United States Patent Application Publication US 2006/0078901 A1 - sequence listing, part 2

SEQ ID NO: 1 - DNA, 2944528 bp, Listeria monocytogenes (residues 1,472,265-2,944,528 of 2,944,528)
cgacagattcagtcatggcatatccagttgtcattttcttatatatggttgctacttttaagtcttcactggttaagctagcgatatcttcttttgtcactttgtcaacttggattttgtaagctttagatgaatcaagcgcttgttctttcgcggataagcggtttaaagattcagtttgatgcgttaaaatccagtaatctttcaaatcacgatcagttaacttttcaggctcaacagtaattagcttttccaatgtttgagctacatgtagagtttctgcagtctgtgtttgttggctacgtgtgtaggtaatggatttaaccgctgaattaccaaccaacaaattgtaattccggtcataaatgctaccacgtggtacgtttttggaaactgttacgttatctgtttcttctaattgacgtttgtacgtatccccttgcacgatttgaacaataccaagtcgtaaaattaacacggagaataatataaaaataataaagaatagaatatttaaacgtagtggaatgatggcgcgtttcttcttagtggaatcttttttcttttttctaaaatttagtttcacgcatagttacctcacttttcaataatacctttccctattgtagctgaaataacatgatttttccactgtaagttgattagaaattcattagaaattaaaaaagacccaccgaagtgagtcttatgattattatttagctgcgtcaaagcgtttgttagcttcatcccagttaataacattccaaaatgtttcgatatattcaggacgacggttttggaatttaaggtagtaagcatgttcccaaacatctaagccaagaacgggtgttttgccatcgcttaatggagaatcttggttagctgtagaaacgatttctaatttgccatcattaactactagccaagcccaaccagaaccaaaacgtgctgcagctgctgcattgaatttttctttaaattcgtcaaaagtaccgaattcgctttcgattgctgcttttaaattgccagttggagcgccgccaccatttgggctaagaatagaccagaacaatgtatggttagcatgaccgccaccgtggttacggacagcgccgcgaatatcttcaggaacgctatctaggttagtaactaattcttccgcagatttgcttgcaagttcaggatgaccagcaaccgcttcatttagttttgttacataagtattgtggtgctttgtatagtgaatttccatggtttctttatcaaaattcggctccaaagcatcataagtataaggtaatttaggtaattcgtaagtcattaaaaattcctccttgtattgtttttacgtgaaaagaaatgacgtataaggcaaaagtttcatgtcctatttcaatagaactactatcaaccttaaaaacagtttcttcttacaccatttagcctaccatgctcccgaaatgcttgcaatttttctgctcattgatgtttcaacattgattttgcgaccatttcaagctatgattaagtttaggtggaaaagtacgctcttttgcacatacatgtatctttttccctgaaactcaaaagttaaaccattaggcgaggtgttgaaaaaagaatgaatatttttaaacgcttctggaagagcttatattcccctgcggatattgcatcgtttcgaaatgataaaattagaaaaagtatcgtgtacattattgttttatcatttgtaacattccttccattagcatattttacgaacgtcacaacaaaaaatgcgctcaaagttggcgaagaaactattaccaatgaaatacccaatttcaaagtgactgatggcaaattagtgttaacagataaaaatgcaaaaaatatacctatctcgattgatcaagatgaactacatatttattttgatgcttccggaacactggataaggatgacgtagataataaaattgcttcttatgatagcgcggtagcttttctatcagatagtatttatattactgcagctggtgtttcgcaatctgttagttatgacacagcaggaattagtgataaggcagatttagttcatttatataattcgattgagtcattagctaaatactttattccaattgctttactagtactctttatctttacgctaggctcggtcttcttccgagtagcactgtatgcgcttttcggatttattctttctggatttggccgaactggtatcgccttccgccaaaattggatgattgcttcttacagtattacactggcagcagtgttcaccatgattatggaagctttacaaattattgttccttttggaatggaaattaacatggtcgtgagtatgatttttgttttccttgcgattcgttcaattcctccaagcgagcctacaattttagagaaataaatgatagccacttgctcacgcaggtggcttttttgtggcatcattcacgtgattttgtttcatgaaaatggtatgataaaaaaataaaagctagtctaaaggagtggtctctttgaatgaaagaatatttcgcgaaaacactcgcccagtccaagtgggtaatttaactattggtggtagtgaggaattaactatccaaagcatgactactacaaagacacatgatgtcgaagcaacagtagcagaaattcaccgattagaagaagctggttgtcagattgtgcgagttgcttgtcctgatgaacgtgcagcgaatgctcttagtgccatcaagaaaaagattcatattccgcttgtggcagatattcattttgattaccgactagcacttaaagctattgatgcaggtgttgacaaaattcggattaatcctggtaacattggtcgccgtgatcgggtggaaaaagtggttaatgctgctaaagcaaaaaatattccaatccgtattggggttaatgctggtagtttagaaaagaaaattattcaaaaatatggttaccctactgctgacggaatggtagaaagtgcacttgcccatattaaaattctcgaagatttagatttttatgatatcattgtttctttgaaggcttctgatgtgaatttagcaattgaagcttatgataaagctagtcgcgcatttaattatcctctgcatctcggaattacagaatctggtacacaatttgctggaggaataaaaagtgctgctggtttaggagcgatactcagtttgggcattggaaatacattacgagtatctttgagtgctgatcctgtggaagaaataaaagtggcccgggaagttttaaaatcatttggtctttcctcgaatgccgcaatgcttatctcctgccctacttgcggtcgaatagagattgatttaattcgtatcgctaatgaagtggaaaattacatagcaaagattgaagttccgattaaagtagccgtgcttggctgtgcggtcaacggccctggagaagctcgcgaagccgatatcggaattgctggttcaaacggagaaggccttctttttagacatggtaaaattattcgaaaagtaccggaagctattatgatagacgaacttaagaaagaaattgatattttggcagaagaattttttgtgaagaaaatagatttggaaagccttagataatcgtatcaaggtttttgtttcaagggggattatcgttggaaaaagaaaatgagctcagtttttatgatggtgttaaagcctgtctccctaccgtccttggttatgctgggattggtattgctgcaggagtagtaggaaaagcatcccatttaagccttttagaagtgacattacttgcgattatcgtttacgcaggtgcggcgcaatttattatttctggtttgttattactacagagtccgatatcagcaatcatttttactacttttttaattaattcaaggcattttttaatgagtatggcggaagctcctcattttaagaagtattcattgtggaataatattgggattggttctcttctcacagacgaaacgtttggtgtatcgatgaatcatattggcaataaaaaacctgttagtgctaaatggatgcacggaataaatataactgcctatctggcatggattgtcgcctgtattgttggtgcatttattggtaattggctgccaaatccagaacaatttggtttagattttgctttgtctgctatgtttatcggcttactttatttacaagtagttagcgacaaaagtaaaaaaatgagtacaagtttgttagtgatggtacttgttgcactgtttttgattctgtttatgcgagttatgacacctgaactagctattttaaccgcgacgttacttggatgtttgatgggagtgattttagagagatggcgttaagttcttatactttatttgttattattggttgcggtcttgtaacttttataccgcgtgtcttgccgtttatatttgttcgtaaattacagcttccagatgtagtgattcgctatttatcgtatgtccccctttgcattcttacagcgctattcgttcaaagtttattgattacaagggaaaatagttttccgggaattaatatcgaaaatctactcgcttcattgcctaccattattacagccatcttaacaaaaaatctaatgtggattgtcgtagttggtattatttccatggccctaatacgtttatttgcatagaaaagccctttactggcgtgtgtttttgacgggaatcaaaaccagtaaagggcttttactataggtggatccgaaataactttagttagatgtagtcgttgaacttgttgaggatgtacttgtgtaatctgcaaatgcatcttttaaatcactatctttaatatcaatattagcagcttttaactcttttttgagtgcagctgtcatattttcagacgttaattgagatttaatataagcggcttttacgttggctttttcttttgcgtaagtgcctttttctgttttcttgactaattgaatcaagtgatatccgtaagtggatttaacaatgccacttacatcgtctttattttctagtgcataggctgctttttcgaaagtttcgtccatttctccagggccaaatggatctaaaagtccaccatttgtgctagttgcagtatctgtcgagtattcttttgctaaatcagtaaatttttcaccatttttcaatttcgtttgaatttcttttgctgtggcttcatcatctactaaaatatggcgaacagtaatatctggttcccacgttttgtagtaggcttttagtttactttcactaacatccatgttcgcttcggttgctttttgaacaagtaaattatactctaaattttctttgaaagaagtttttgttaaattattagaggataacgttgattcaaatgagtcaccgtattgttcttcatatttcttatattctgcatttacttctttttctgttacggtgtatttatcttctaagatttttttgaaagtaagttgttgcacgacctcatttccataagtcgttttcattgcttcgtaaagctcatcttgtgtgacacttcctgcatctgtttttataacagcgctacttccacaaccagcgagcagtagtaatgtagctgctattacggaaatcatcactttttttaattttgtcaaactgttcctctccttcgtctttcggctacttcttactttagcgataaaaagtgtccagaataagaaacaaatatgaaataactatgaacattaaggataaaaataaaaaaggcccggatctcggacctttttgctattaagaggcttgtaaacattctggacattcgccgtaaacttcgaatttgtgcccgtcaatttggtaaccaggtaaagcttcggttaaaaaatccattgggcacatcataatttcttttgttttaccacatttcatgcagataaagtgatgatgatgatgttcgtgtgtacaagctaaacggaaattgcgttcaccagaaagatcagtttcttcaaaaatacctaattctacaaataaagagagattgcggtaaatcgtatcaaaacttattcccgggaaatcatctttcatattttctaagacatcttttgccgtcaaatatttatttttccgagctagtaagttaattagaaattcacgtttatctgtgtgtttatagcctttttccttcattttcatgagtgcttcagttgctgtaagtcccattttcctcacctcgttttgaaattaagattttttgtcgtattttttgatataaaatggtgacgattaaaagtagcacagatataataacaatagctccaccaggcgctaaatttaaataataagcggtaaatagaccaccgataactgcaatttcaccaaataaaatcgataataaaatggtttgtttaaatcctttagcgatacgaatagctgctgcaacaggtaatgtcattaaagatgagacaagtaaaataccaacgattcgcatggaagacgctattacaagagcgactaataccataaaaataacatcgaatactttggcttttagacctgaaacttttgcatattcttcatcaaatgatagtagaaataattctttatataaagataaaataacgataaatacaataatcgcggtaacgacaatcgtaatcatatcagtgcggctaacggcactaacactaccaaataaataactaaacaaatccgtattaaagccattcgctaaggaaataaaaataacagaaaaacccatacctgccgacataataatcggaattgctaattcttcaaagtgcttatagacgttgcggagtttttccattaataaagatcctacaacggaaaaaccaaagccaagatataacggattaagggcagctaatggcaaataagttttacttaaaaacaaactaactgcaatcccacctagagtcacatggctcagcgcatctgccattaaagaaagttttctaacaacgataaaacttccaagtaatggggctacaacacctatcacaagtcctacaataaatgtattacgaataaaatcatactggagaagcgtcgcaatcaaggcaagcatcctcccttctacgctgttctgctaatatctcaagttcgcggtcagccaaataatgttgatattcatgtgccgaaccgtcgaaaataatgcgcttattaatgctaataacatgattgacatacgtattcactgccatcaaatcatgtgtcacgagtaaaagtgtcatttcttctgtccggtttaattcggccaaaagttcataaaaagctttgacattttcgacgtccactccgacggttggctcatctaaaattaaaagttcgggtctgctaactagcgcacgtgcaataaaaacgcgttgttgttggccaccagagagctccccgatgttgcgatgcagataatctgtcatttctactcgcttcaaagcgtaatctatgtcttctttatctttattgtttaatgttttaaataagccttttttctttgttaatccgcttgcgacaacttctttcacagtggctgggaatgcggagttaaaggcgttcgatttttgagaaacgaagccgattttgacccagtctttgaaatctgcttgtttttctccaaataaggagatgcttccttgttgttttttgagtacaccaagaattagttttaacatagttgatttacctgaaccatttgggccaattaaaccagtaaaactgccttttgcaacttgaaaatgaatgttttctaaggcatgttctttatcataatgatagcttacattatttacttctatgatttttttcattcatgtttctcctttgacagcatttgctagccgcttttactagtatataaaataatagtgaaaatgtaaatcgtaattacttcgaattaaaaaattagacaaaaaaacctggaaagcttggagcttttccaggttcgtataattatttagcaaatgtgtccgttaagattggaacaacttgttttttacgagatacaacgccttttaatggtgcttggttttcgacaaatttaacaccatatgcttcttctacgactgctgtttttgaaccaatagcgattccaacagagtcattagttaggatattagtgatgacgaatagatataaatcaagccctttatccacaatattttgtgtcataagtgcttccacttctgcgcgacggctaagtacatcgtttacatccactacattgatttgagcgatttctactttgttatcgttcatgttgaattctttcgcatctagtaggagttcagctactgtttttttgctaacatctgctcctgcttttagcatttccatgccgtatgattgaatatcaacgtctgcaatctgtgctaatttttgagcagctactttatcttcttccgtgcacgttggcgattggaaaagaagtgtgtctgaaataattgcggaaagcattagacctgcaactgttttgcttacttctacttcattttcgcggaacatttttagaagaattgttgttgtacatccaactggttcagcacggtaataaagtggatcagatgtttcgaagtttgcgatacggtgatggtcaactacagctgtaactgttacatcgtcaatatcatctacgctttgttggcgttcattatgatcaacaagtgctacttcagaaacttcattcgcaactgtttgaactaggcgtggagctgttacttggaaataatcaagaacaaaagctgtttcactattaagctctcctaaacgaaccgcttcaatatctgctccttgtgctttttttaattctgcgtaactaatggcagaacaaatcgtatctgtatctggatttttatgaccgaatacaagtgtttttgtcattattttcgtctccttttagctgttttgaattttatttaataaatctgggtcaaattcgccattttttaacatggcgatttcccatttgtatggtgctttttttgatgctttatctccaccaacataaggcgtttcaaggattttcggcacatctgctagttgcggatgatgcacaatataatgaagggcatcaaagccaatatgaccaaaaccgatatttgcatgtcggtctttatgtgcgcctcgttcattcttgctatcattgatatgtaatactttcaagcgatcaatgccgacaattttatcgaattgatttaatacgccgtcaaagtcattcacaatatcgtaacctgcatcatgcgtatgacaagtatcaaacgtaacggataataattcattgtgcgttacgccatcgataatttgtgcgagttcctcaaaagtacgaccacattcagaaccttttccagccattgtttctaaagcaatttgtacatcttgatcatgtattaatgcttcattaagaccttgaataatctgtttgattcctttatctgccccttcgccaacatgagcaccagggtgaagtacgatttgcttggcaccaagcgcgcgcgtacgttcaatttcagattgcaagaaattaacacctagttcaaaggtttctggcttaacggagtttccaatattaatgatataaggcgcgtgaacaacgatgtcagccatatcatgtgctttcatgtgttctaagccagcttcaatattcaactcttcaattggctttctgcgcgtattttgcggagcaccagtataaatcataaacgtatttgagccgtaagaagctgcttcttcacttgcgccaagaagcattttctttccgctcattgatacatgagaacctagtcttagcataattcattcctcacttatcgttttttccgtctttcgcgacgtttaatttcgttcattttgtagttaattttctttttatagtttggtttacctttttgttttgcttttttacgcataccaatttcacgtgggtcagctgtttcgcgttttgcttcacgttttgcacgacggttacggtcttcgagtgtaacaaattctttatttttccagtcaacgtgtttaaactcaatacccattttttcgagttggtttagacgatcttcgtcagctggttcgaataaagtaagtgcgataccagaatgtccggcgcgaccagtacgacctgtgcggtgaatgtagaaatctaagtcatctggcaactcatagttcacgacatgactaattccttggatatcaataccacgggcagctaaatctgtcgcaacgacatattggtaatctaagttttcgatttgtttcattgtacgtttacgttcacgcgggttgacgtcaccatgaattttggctactttaagtccacgttcgattaatccgtttgctacttcatcagctgttgttttcgtattagtaaaaacaatcgccaaataaggttgcgaaccaactaaaacatttttaagtaaatcaagtttattacggctacgagtggccataatgcgatgttccaccgtttttgaggcagccacttttggctgaatatgctcataacgtggattttccatatatttgcttaaaaatggttttaatttttgtggaattgtagctgaaaaaacaagcatttgtaaattagctggcatttttccagcgatatggtcaacatcatttaagaagcccatatcaagtgtcatgtctgcttcgtcaataactaacgttttcgccgtatgaacaaataaagcttgttcacggattaagtcattgatacgaccaggcgttccgacaataatttgtggctgtttttttagtttatcaattgcacgttgtttgtccgtaccaccaataacgagttgtacagcgatttctttttcactgtatttggttactttgcgaatttcattataaatttgagtagcaagctcacgacttggtgccgtaataaccgcttgtactgcatctttttcaggattcacattgttaataattggcaaaataaaagtatgggttttccctgtacctgtttgagattggccaatgatactttcaccttttaaaatacctgggattagcttctgttgtacttctgttggctcatagaatcctaatttatctattgcaagcccaataaaaggttgaaagccaaattggtcaaaccttgatttcttcgtcataaaatatttccactccgttctatacctagtagccattatagcacataattggacattcgtgcgcgtgttaagacaactttgtcaaaacaagctaagtctattatactaaataaagaatctaatacagaaatgaggatgttttcgaatggaaattatcaaaatatctcctcgtggttattgctacggagtcatcgatgcgatggtgattgctaaaaatgcatcccttgatccaaacttgcctcggccaattcatattttaggtatgattgttcataataaacatgtcaccgatgcatttgaatccattggtatttatacagtagatggcgctaatcgagaagaaattttagataaaataaccacaggaacggttatatttaccgcacatggtgtttctccttccgtcaaagcgaaggcagtagcaaaaggcttaacgacaatcgacgcaacctgtccagatgtacttcacacctataatttaattttagaaaaacaagcggctggctatgaaattatttatataggaaaaaaaggacatcctgaaccagaaggcgcatacggaacagcaccagatgttgttcacctagtagaaacgaaagcagatattgatgctctttcattactttccgataaaatttttgttacgaaccaaacaacgatgagcaaatgggatgtcgctgatttaatgcattatataaaggggaaattcccgaaagctattcaacatcaagaaatatgtatggccacccaagtgcggcaagaagctgtcgcattacaagccaaagatgctgatctcactattgttgttggtgatcctagaagtaataatactgctcgtttagcccaagtttcgatagagaaagctggcacaaaggcgtaccgaattgccgatattacggaattagatatagagtggatcaaagacgcaaaaaaagtagcagttacagccggagcaagtacgccaacacaacttgttcgtgaagtgctattgtttttggagcaatttgatgcggcagataaaactacttggaaacgcgagcataatcaggactttgagcgtattctacccaaaacgaagaataagtacatggctgaaaaaagaagtcaacggttagctcacttgaaaaatggcggaagctaaaaaccgagcaactcccttaaacaaaggagttactcggtttttttatcaacaaaattggaatgggtctgtatttacttctgaaacaataaattctgcttcataatccaaaatttttgcttgttcttccattttatttttcagatagcctttcatcactttttcgatattatgaccagcgtcaatagttggaagattaatagctaataagtcatgccctgtgtgataataaacatcaccagtaataaaaacatctgcaccagtggattttgcttggtggataaatttatttccatcgccaccaatgattgctactttatggacagttgtttttaaatccccaataaaacgaacattatcaatagcgaaagcagtttttaatttatcgataaatgaaaccatgccgagttttttaggaagcatgccaacacgacctaatccttctttataagtctgcatttcaagcgtatatacatcaatcgcgggttcttcatatggatgcgcaattttaactgctttagtgatagtttccgttaaatactgtggaaatatagcttctattttaacttcaggaacagaagtcagcgcatctttttcgccgatagttgggttggcgtttgctcctggtttgaaagaacctatcccggtcgtatggaaggtgcactctgtatattctgtccctatttgtccagcaccgttatttacaagtgccaatcgaacgctttctaactcattttctggtacatacacagcgattttacaatatggttcggagtaggtctcctcaatcatcgttgtattttgtaaatggagtaaatctgctaaaatattgttcacgcctccttgagcgatatcaaggtttgtgtgtgcagcgaatacggtaatatcatgtttgattaatttttttatcatttttccttgtttagttgttgtgtcgatatgttgcgttggtcgatataagaacggatgatgtgcgataattaaatccacttttttctcaatagcttcatccacaacttcttctaatacatctaaggtaaacatgatttttcttacttttcttgataaatctcctacttgtaaaccaatgggatcgccttccattgcgagtttttttggtgcgattttttccattattgctgtgtattcatagccatttgcgactttcattttagcacatcctctactaatgcgattttatgttctaattcacgaattttcgcttggttttctggtgaaactggttggttgttagaaatagtctgaataatattttgccatgtatttgcttcatgtcgccatttgcttttgaaaatggcgctttgatcttttagtaaacatggtccgaaaaatatttcttgcttagtccaagcaactggttttttagaaggagctaacaccatgatttcataaattttattatcttcgcgtaaaattgcttcagaggtaataagccaattgttttgttcggaccattctcttaattgccatgctgcaatattaggttgcaaaattagtttggttacaccggctaattttgcggcaccttcttctaaaatagtgcgtattaacgcgccacccatgccagcgatcacaattgtatcaattacatcctttttttcgataacagctaaaccgttcccttttctaacatcaatatgttctgttaagccagaagaacgaacttgtttttgtgcagattgaaaaggtccatcaaccacttcgccagcaatagcgaacgaagccgtttgatttttaactgcaaaacatggtaaataagcatgatcgcttccgatgtctgcgattcgttcattttttgttatgtaagaagccactttttcgagtcgcttcgatagttgctcttcgttcatttggttccctactttcattttcattaaaaaggcaggagaacggtttgtcctcctgcccggttgtgcattattccaggaagtctttcaattgtttgctgcggcttggatgacgtaatttacgtaaagctttggcttcaatttgacgaatccgttcacgagttacaccaaatacacgaccaacttcttctaaagtgcgcgtacgaccatcatctagaccaaaacgtaagcgaagtacattttcttcacggtcagttaatgtatcaagcacatcttctagttgttcttttagtaattcgtatgctgcgtgatcggacggtgaagttgcatcttggtcttcgataaaatcgcctagatgtgaatcgtcttcttcaccaattggtgtttcaagggaaactggctcttgtgcgattttaaggatttcccgaactttttcagttggtaagtccatttcttcaccaatttcttctggtgaaggatcgcggcctaaatcttgtaataaggagcgttgtacacggattagtttgttgattgtttcaaccatatgcaccggaatacggattgttctagcttggtccgcaatcgcacgggttatcgcttgacgaatccaccacgttgcataggtactgaatttaaaccctttattaaagtcaaatttttcaacggctttcattagccccatgttaccttcttgaattaaatcaaggaataacataccacgaccaacataacgttttgcaatacttacaacaaggcgtaggttagcttctgcaagacgtcctttggcttcaatgtcgccagcttcgatacgttttgctaaggcaatttcttcatccgctgtaagtaagtctactcgaccaatttcttttagatacatgcgaacagggtcattaatttttacgcctggtggtacactcatatctgttaaatcaaaggattcggtttcttcttttacaagttctgtttcatctggatcctcgtcatctgcatcgtcagaaacttcaattcctgcttcaccaacatgttctaaatactcatccatttgatcggaatccaaagtgaatggagctaatctggcagcgatttttgcataagttaaaatcccctttttcttaccttcttctatcagggcttcttttacttgctcaacacttagttcagcaactggttttgtgttttttgttttatcactcataactgcctgtattcctccttccaaaatgccgctaaccttattaaaaggcttctcttaggtaataataccatcatttagcggttttaaaacgttattaatccaattggccgctgtttaactgacggttgagttggacaatttcgagcatgacgcgaatttcgttttcattatcgttttcacgattatacgtcgctagttcttgctcaagttcttttttcttttgttctaatttatagcgttttagacttctaatatagtcttcaaactggggtttaccttgttcatctggactaataaccatttctaggctactaataagtcctttcattgcagcatcaggaacactatccatgaatttcgttggatccgcatcattaccttccgcaaaataaccaattagataggtataaagcgcttcgtaattatcatggtaaaacgtcgtatcaccgagaagttgcttaattaaaagaaagttatctcggctttccatcattgctttcattagctgctgctctgagattgtatgggcagataacttttgggctggctgctcaaaagaaaatagcatttctgcaccttcttgaggcatcattcccataaaagaatcatctattggtggttcattataactagccatttgccttgatttttgactattttttagtgattgctgtaattgttgttttaatgtttctatcgttaattcaaattcatccgctagttgttttaagtataattcacgttcgacggcttgatccagttttgcaatttcacgcaaacaatcatcaatataaccaatttgctctgtctcattctgtaaattgcgttctttacgtaaataatgaattttaaaagctgtccaagtcattcgttgttgcttatagacttctttgaatttttctggaccacttgctcgaatgaaatcatcaggatcttttccagctggaagttgcaaaacaaaaacatctaaacgattccgttcaactagaagtgtgccagctttataggctgcttcaattccagccctgtcaccgtcataacaaataatcgcccggttagtaagtcgtttaattaaatctgcatgttcttccgttaaacttgtccccatcgaagccactgcattttgaacacctgcttcttctgcggaaataacatccataaatccttccatgagcgtaatttcttcttgttttctaatagcttgtcttgcttctgaaaaatgaaacaatattcgtcttttattgaaaacaggcgtttcagggctatttaaatatttaggaccatcatcacgatcaaataaccggccagaaaaggcaataatttgtccacgatcattcgtaattggaaacataattcgattacgaaaacgatccaccatctgcccatcatcacgttcggataaaagtccagctgcaccggctaattgtaaatccatgcctcgtttttctaaaaaagaagtaattgttgcatggtgattaggtgcaaaaccaatttggaaagtggtcatcatttgttcagacataccacgctctttcaaataagttaatgctgctgtgccttcttcggtttccattaaaatataatggtaaagtttggcagtaagctgatgcatttccaccatttttgctgtttcagaagtttcttttggcaaattacttgtatctcgttcttcagggagctcgatagccacatctaaatgactcatgtctgccactttttttaccgattcaacaaaagtgagtccgtcatgctccattagaaaagaaaaaacatttccgcccttaccacaaccaaaacaatgaaaaatctgtttttctggtgatacggaaaaggatggcgttttttcaccgtggaaaggacataagccagaataattacgtccttgtttttttaactggacataattaccaattatatcgactatatccgcttgattccggacttgatcaattacttcttcaggaatccgcgccatgttgacagtcaactcctatttacttattttgcaaaaatgtcgtcaatcggtctttgaaaagggaacgatcttgatcgctcattgcttttggacctttgctatatttgccttgttgcctttctttggcatgtctatagcgaatatctaacattaatgacatttcttcttctcggtaaagttcaccgcgattagaaaagacaaatgtgccttttgcaagtagaatgctagctaggccaatatcttgtgtcacgataatatcgccttttttggctaaattcatcattcgcatgtccgctgattcttttcccgtatcaacaaaaatccaattctctccattggtattgacagagtaatggttaaacgaggcgacaaaagtaacttctaattgaaattcttttgctacttgttttatttctgctttcactgggcaagcatctgcatctaccaaaatttgtggcacacattccatcctctcttcaaaatctatgaaggcacgttaaaaaacgagtttttccacccgtttttaaaataatatgcatagatttagcttttttgtaagcgaaattagattatacgggaagatactaacttttacaagcagattttcccgtataatatatatattcgccacaaaaagcaaaagtccttcttataattctaaattttcatcaacaatttcaccaatatggattaaaatctcatttgcagtctcttcaatggctttatttgtcacatctaagacgaaacaattaagtttgctcgctagtttattaaaaatggctagttcctcatcaatacgttgattacttgcatacgtacctgcaccaggcagaccaatggaaattaatcgttcttgtctgattttcgtcaatttttgtttgctgatttttaggccaataatttttttcggatcaatttcaaaaagttcatctgggatttgtgcttctggaacgattggaatattaacgattttcaagccttttagagctaaatactgtgataaaggcgtttttgatgttcttgaaataccaattaaaacataatccgcttgtaaaatacctcttggattacgtccgtcatcattttcaacggcaaattcgattgctgctactttattgaaatacgcttcatccatcgaacgaacgcgtcctggttcagaaagtggcttgattttatacgtttcctctaactggtttaaaagcggaccaaataagtcgataattggcacaccgaaagcttgggctgttttgtttagctcttctcgaacgctctctagtacaatcgtatggacgataataccattattcacggccactaagtcgacaatttcttcaatcatatgagaagaatcgacgtggtgaaaacgatggataaatttcggtgtctgaccaaattgactaagtgccgctcttgtcacaagttcggccgtttctcctgttgaatcggaaaccacgtatacggctggttgagtcatacatacttcctcctctttgctcaaattctttctttattttacattaatttcatccatttgagcaaattctttaataaagcttgccagttcgaatagaagtgctagacggttatttttcaattcatcattatcactcataacaagcgtattatcaaaataagcatcaattgttgttcgtaaatccgcaaaagcttttaatcgttcaataatggttagaccggcataatcgaatttcagtttttctaatttatcaaagagagcttgttcgtattcattttcaaataacgctggatcaacttccacgccatcttcatattttttagcaatttttacgacacgactaagtgcttcaatcgttggacggaaccattcagcctctgcatgttcatttagaatttgcgcccgatcgataagttgcggaatcacattagggtctccgccgataacagcatcaataatatcatgacgaatatggtgcccttgtagaataacacgtaggcgatttttcaagaaagtctgtacttctttcttaacatctgcgtccggtaattctgtagagccttctgcacgttccatatccacaattcgggaaataacttctagcattgggatattccaaccgtttgcttggataatacgcatcgctccgaaagcactacggcgtaaaccaaatggatcagcggaaccagttggaacaatgttcacgcagaaaaatccgataagtgtttctaatttatctgcaatagcaattaaagaacctagatcagtttgtggtaattcaccttccgctgagtttggcaaataatgttcgcgaatagcagttgcgattgcaggtttttcaccttgtaataaggcatacttctcacccattaacccttgtagttcagggaattcaccgacaatgtttgtcactaaatcgaatttataaatattcgttaaacggataatatcttgtttatcttcttcttgccaatctaggtagtccgcaagcattaaagctactttttgaacacgtttcattttctctgttaatgtacctaatttttcatggaaaacgatattttgaagtttagcaactgcttcgtcaatcgtcatttttaaatcttcttgatagaagaaatcagcgtctgacaaacgagcgcgtaacactttttcatttccacgagcgactgtgtcaagattttcatggtttccattacgtacagtaacaaaatgaggtaatagttcacccgcctggctaaatacagggaaataacgttggtgttctttcatagtagtgatcaacacttcttctggtagttctaaatattctttctcgaaattaccagataaaacggttggatattcgactagatttgttacttcttctagtaagtcatcatcttctttaatttgccaattttccatggattctagttcacgtaattgttctacgatagcttgtttacgttcttctgcattcacaactacaaattgttctaataacgcattcggatagtcgctaggttgtttaattgtggctgacttacctaagaaacggtgaccacgtgatgtgttacttgttgttactccagtaatctcaaatggaatgatttcttcgtcaaacatagcaataagccatttgattgggcgaatatatcttaaatcattgctaccccagtgcatacttactgggaaagtcatgctagttactactttttctaaacttggaagtaatgtgcttgttttttcaccaatgacttcttttttaatgtagatatattccacgcctttaatatcacggaaagtaagatcagcagggtcgactttttggcttttagcaaaacctaatgcagcttttgaccaattgccttcctcgtccaaagcaatttttttcgctggaccttttgcttcttctacacgatttgcttgctcttctgccattccttctacaagaacagttaagcgtcttggtgttgaataggttttaatttcgccaaactcgattttattttcagttagccagtccgttacacgtttttctagttgtaaaacagaactagtcacatattgtgcaggcatttcttctaaaccaatttctaataaaaagtctttactcatgacgttttcctccctcttctttgagtaatgggaagcccaatttttctcgtgattcataaaatgttttcgcgatgcgtcttgctaagtttctaattcgaccgatatactgcgcacgttcggtaaccgaaacaaccccgcgagcatctaaaaggttaaacgtatgcgaacatttcaatacgtaatcatatgctgggaaaacaaggccgtcttgcatttggcgagtggcttctctttcatatgtgtcgaaaagtgtcaacaacatatctgtattcgaagtttcaaacgcatatgtcgagttttcgaattctgcttggaagaaaatatcgcggtaactaataccttctgtccattctaaatcaaatacattttctttatcttgaatataacttgctaaacgctctacaccatatgtgatttcggaagtaacagggaaacattctaaaccacctacttgctggaaataagtgaattgtgtaatttccattccatctaaccatacttcccaaccaagacccgcacaaccaagtgaagggttctcccagttatcttctacaaaacggatatcatgttcaagtggattgatgcctaatttttctaaagaccctaaataaagctcttgaatattgtcaggagaaggcttcattactacttggaattgatgatgttggaataatctgtttggattttcaccgtaacgaccatcagcaggacgacgcgacggctcaacgtaacccgctttccacggttccggaccaattgcttttaagaaagtgtacgggctcattgtaccggcacctttttccacgtcatacgattgcaacataatacaaccttgctcggaccaataatcttgtaatgttctaatcattgtttgtaaattcattgcttccacctccaaaaataattcagccaatataaaaactctcgtctctatatgctgatttaaagcatatagggacgagagttagctcgcggttccaccctatttggaattaaacaattcccaccttgatttcgctgtactccagaacgccttcacaaaaagttaaatattcggctcccaccaaacccgaactcgctaaaaatagagctttttgttactattttccttcaacgcacctattagttgatatattaaaagatactgtatttttgctaaaaagtcaatcatcgctatctttttttaacatattttcccatttgtccatttctcgtataaatttcctgctttttaaatacaaaccagaatattcatcgtagtaagtatcaattgctttttgaagccagtcttttgtttcttgctttacatcaatgttgccaagtctatccaattgaaaaatgaaaaacaggcgtaaaagttttacgacattttccggcaaatgcattctgtaccgatctttctcaaaacagcgatgacaaataataccattactgcttgtcgaaaaatcaaaatgtccagttgtttcgccgcaaatagcacatttatccatcgttggataaagaccgagcacaggcaacattttcatttcatatatttgagtaaggatttgcggatcataaccctcgtcgatatctcgtaaaatttgaaaagttaattcgtataaatacggattcggttgacgttcttctgtggctttatccagcaattcgcaaacataggtcgcataagcagtcataaaaatatcttgctgaatagaggagaatgtttctattacttctccttgttggagtgtgccgagtccattacctccaaagaaagtaaaataaccattcgtaaatagttgtgttactgcagccaatctgcttttcgttttttttgccccgcgagctaccacaccaatttttccgaattcacgtgtatacattcggacaattttatctgattcacggtaactcgtttgccgtatcacgattccttcgcatttctccatgtggcactcctcccttttttacacgtcttattataacattttcttaacgattatgtctttttatattttttgctatctttccacgtatgcctattgtaaaatagagaaaaaggtaagtcagagaggattttttactatgggtatgttacttatattattagttagcttatttatactcacattcataggagttgttgtggggattattttgcttattgtaagaaaagagaaatgggcgggcattattgttgcgggattatccgtgggaatcggctttttagtattagtagccggactcaatataacgacgattaaattatttgaaggatttaataatcctctttctattcataattacaattcgagcaatgacccatttacaaatgattattcagaagactatgatgatgattactatgacgactacatagacgtaagttacggagaatctgttgagatagaaaatgatagcacggttaccatttataaacctgagctgttccaaataaaggaaagctacgatatttataaagtaaaagtgaaatacgcaaatacaagttctgatccaataagcttctattccgaagacattgcgctttatgataatgcggatgatgattatggccaacaaattacagaagaaggctttgcaggagaaattcaacccggtgagacgaaagaattaacgctttactatgaagtgtataaccttggaccatatgacgtagaatatgataactataactggactacaagtaaagaataattaaaaaagcatctggcgcacaactccaattgtgagccagatgcttttttaatactcttcgcggtcgaaaccgtaatcttgcaaataatgttctttgtcacgccagtttttttgaacttttacccaaatttctaagaagactttggagccgagtaagcgttcaatttcttttctagcgcgcataccaatttgttttagcatttgaccttgtttaccaataatgattcctttttgtgtgcttctttctacaataattgtagcattgattgtaagcttttctgttttagggtttttttcaattccttcaataaccactgccacagaatgcggaacttcttctcttgttaattgtaaaacctgttcacgaattaattccgagatgatgaaacgctcagggtggtccgtgatttgatcttttggataatacattggtccaatttctaagttagcattcgtttgttctagtaagttaggtacgttatttccttgaagtgctgaaataggaataatctcatcgaagtccatcagatcgcggtactgttcaattaacttgaataaatcttctggagcaatcaaatcaatcttattaatcaaaagaaaaacgggggtttgtacgtttttaagtttttcaataataaattcatctccgcgtccaaatccagtagatgcatcgattacaaaataaattaagtctacttcttggaacgtatttagcgcaatcttcaccatgaaatcgcctaacttatgctttggtttatgtatacctggtgtatcaataaaaataatttgtgattcatctgttgtataaacaccttgtactttattccttgttgtttgggctttatcactcataatagcaattttttggccaataatgtgatttaataaagttgatttcccaacgttaggtcgcccaactatagctacaaatcctgatttaaatggttcactcataacatatcctccgatgtgaatgcgcctggtaaaagttctttcactgttaccgtcgctgtttttcctgttaaatttgttaatattaccggcatatctggcgcacaaaattcactgatgacttgtctgcatgccccacacggcgaaacagggccgtctgtatccgctacgacaactaactgtttaaaatctcgttttccttctgatacagctttaaaaatagctgtcctttctgcgcagtttgttaaaccgaatgatgcgttttcgatattacagccaagtacaacctcgtcatctttcgtaacaagagctgctcctactggaaatttcgagtaaggaacatacgcaaattctcttgcttgtttagcgagtgagataaaattattttctttcatttaccaagtcacaatcccttctttttataaaaacatctggcaaaagtatggtatgaatattattagtccaataaaacttgctacaattgctgctaacagtaccgctccagcagcaacatcctttgcttttttcgcttcatcaatgtattgctctgtcgccacatctaccgctcgttcaatcgctgtgttcaccatctctagcgttaacacaccaaaaatagaaagaattaataaaatccattcagatttagttacatgaaagaaaaagccgcaaataataacagcaagagctgcaaaagtatgaaatctcatatttcgttcttctaaaaaagcagtttttagtccagtaaaagcatgatgaaaagattctgcataatttttactacgtttgtattttctatctttcaagtccataagcatccaacacttctttttgtaagccaaacatgactttctcttcgtcaggctccatatgatcatacccgagcaagtgcagtaatccatgaactgctaagaaacctaattctcttgcttttgtatgtccgtaatctttggcttgctcttctgctttttcagtcgaaataataatatcaccaagcatgcgaggcgtttcaagatcaaattcgccccaatcaatctctgtttccccgtcgcccatttcttccagcgcgaacgaaataacatcagttgcttgatctttatcccgatattctcggttaatctcgcgaataccttcattcgttgtaaaagtgagtgacagctctgtcccttgctcgatttttaaatattcagcagcaaattgtaaaatattttcaactagctgtttatcttcatcaagtaaattcttggtttcgtctagtaaatcaatttctaagaccgtcatcttttgccctcctatttcaatctttgtcatcaggatattgaattcgttgatgatatattccgtttaatgtggcgattaaggtgtcacgaatgattttaatttcttgtattgtaatgtcacattctgtaaattgcccatcaaggaaacgatctttaatgattccgtcaataatttctgttatttttgccatggttggctctgtggaagaacgaactgccgcttcaacactatccgatatattgataatggcaatttcttttgtttgtggctttggaccactgtaacgataatctgcctctttcacatccgggtttgtttctttcgctttaaaatagaaatatttaagcagtgtcgtcccgtgatgttggagtgcgatatcaataatcggttgtggcatatgattttcttttaaaatctctgctccgtcttttgtatgcgagagaattatatcacgactttgttctggtgtcagtctatcgtgcggatttattccttgcaattgattttccacaaaataaggtggtcttaatgtttttcctatatcatgataaaaacagccaacacgaacaagtaaactattggctccgattttgtcagcgcatgcttctgctaagttggctaccatcatactatgatgatacgtaccaggagctttcattaatattttcttcaataatggatggtttggattagccaattcgaccaaacgactcgttgttaacaacccaaaaatcgtttcgaataacggaataactcctactccgaggataaacgcgccaaatccacctaaaaaggcatatccaagcgccattagtgtagaaacttgcagtagtgtgctgttatttattaataataaaagtaacacataaatcatattaattaaaccgaccataaaaccagacaacatgatagccgaacgtctactatagtcccgtaacataacaacactcgtcgctccactcaataaaataaaaatagttataccgcttgtagcatcattttgaaatgttaacaaactagttacagcaataaaaatgacgcttaaaaaggcatatttctcattaagtaaaattttgagtatcattggagcaaaggctgctgggaataagaaagcaatattcgcaatattttgcgtttctaaaaataaaataatgaataacataaacaaagatacaagataaaccgaagaaaaaataagcatcgtctgcatttttttcgctttaggttgtgtttgttttttcgtgtagaggaatagaattgctgctaaagcaataatgaaaatagcaaatccggcgtattgttttacaggcattttttgatcaagtaaatgtagcatttttagctgacgatatgtttctctatctacaatttggccttcttgaacaataacttgcccttgtaagattttcacaggaacaacggattgcgcagcttctttacgtcgtgcatctgtctgctcttcatcataaacttcattcggtacgatagcataggaaactaaggcttttgagacatttttgtagtaagctggtatcgctgaaagttcaatatcatcacgagctctaattttcacagaattcaagttttcatctcgaattttattttccatggatttttcaacttctgttgtaaccacgtcttccatgacattaaaatctttacttttcgcttcgattaaagtagtgaaaacttcgtcagatatgttagaagttattttttcagatacgttactagataatttgtcttttaagttttttaatttatcttcggttgacgttggcgcaggagcaggcttattctctttttttgctttctctttattcttagtatctttttcttgcgcttctgcgttcacttcatttacataggcgaataaactttggataagtgctactcggttttgaccagtttcgcgattgtagacatacacatcttctacagcatcacttgctttggtcctttcttcttttgttttttctgtatcttccaccgtttgaggtgaacgaatcgttttttcagctacttgaaataacttaacattgtatgattccggtttcgtcatttggcaaacgagaaaatacgctataaccgcaaagcaaactaggagcagtggaaaaaggtatttctttccactttcgatgtaccaatctctccatttcttggctagtttcacatctttgtctcctctctaattttgtttcccttcgtaagctttgataatttcagcaacgagcgggtgtctgactacatcgtgatgttcaaagtaaacaaaaccgatatcttttacatcttttaaaacttgttccgcattgacaagaccactagttgcaccttttggtaagtcaatttgcgtcatatctccattgacaatcattttggagtcataaccaagtcgtgttaaaaacattttcatttgggcaatggtcgtattttgtgcttcgtctaaaataacaaaggcatgatcaagtgtacgtccacgcatataagccagaggagctatttcaataacgccccggtccattagccttgttgtatgctctgtaccaaaaatgtcgtataacgcgtcgtatacagggcgtaaataaggatctactttttcttttaaatctcctggcaaaaaacctaaactttcgccagcttcaacggcaggtcttgttaaaatgattttgctaacatttccttttttccatgcgtcaactgccataacaactgctaaatatgttttaccagtacctgctggaccaacgccgaaaacgatgtcgtgttttttaatcatttgaatataagttctttgtccgaatgtttttggtctaattggcgttccttttgcattcttcgtaatttcttcttcaaataaggtatggaagtaaataagtgttccatttctttgcattttcactgcttgggcgatatctctaccatcaatatgaatgccccgttttactgtcagaataagttcatttaaaacggcagtcgtatgctgtacaggctcttcttcacctgtaatagatagtgactctccccgagtaatgattttcacttgaagtaactcttctaaaagttcgatattcttattattattgccgaataaatcttgaatatttgtgtcatcagataattcgactacttcattaaattcatttagcattggctaaccccttcacctgttataagtgccttgattagttatattatacacgaaattgccttgcttgaaaaacgaagcgatagcaacaacgcaattcaagtaaaaataggcgtaaaaaaacaggatttcctccataaaataggaagtaatcctgtttcttaatgtttcaaaactagtttgaattagtttatgaaagatatttttttacgaattggttaacagcaccgccgtcagctttgccctttactttaggcataattgcggacattactttgccgaaatcagctttactagatgcgccaacttcttcgatagttgctttcacaatattctcaagctcttcaggagtcaattgttttggcgcgtagtcctccacaatgacaatctcggaacggactttatcagaaaggtcgctacgtccagctttgtcaaactctgctagagaatctctgcgttgtttgagttcgcgggaaatcacggttacttcatcatccggagtaagatctttcacaccttggtgaattgcttcgttttgtaaagctgcttttaacatacgaataacggaaagtttttctttctctttatcgcgcatcgcttgtttcatatcttcatttaacttgtcaagcagtgtcaacgaaatcatcgccttttaattagaatttgcgttttcttgctgcttcggattttttcttacgttttacgcttggtttttcataaaattcgcgctttctggattcttgcaaagttccacttttggaaacagtacgtttaaagcgacgaagagcatcttcaagcgattcgtttttacgaactactgtttttgacatctctctttccctccctccggcacttacatgcactcacttaaatccttcatttaagttccagaataagacataacggaaaataaattatgaattattctgaagtaatgcagataagcattcactcattaaaaattatatacgaaacatcgggcatcgtcaacatgaaatcgttaactttcgtataaaactttgaaatgttaacgatttttatttttgtaaaggtcaaaatagaaagaagcagctgataatacatagagcggagcagtttctgttcttaaaattcttgggccgagtccggcaagttttgcgttcgcttcttcaagaagcaatagctctttttcactaatgccgccctctggtccaaaaatacacaaaacagactgtccaggcttcattgtttgaaataagctggcaagtgcactatcctcgccttctctggcgctctcttcatatgcagcgataacaaagtcatagtgaacatggccaaacattaactctttgaaactagcagcataatgaacttctggaatgattgtcctgtgcgattgttcagccgcttcttgcgcaattttttgaagtcgctcaatttttttgatgactttcttgtcatcccatttcaccacagatcgttctgctttataggagataaatttgtgtgcgcctagttctgtacttttttgaatgatgagttcgagtttgtcgccttttggtagaccgctcgcgatggtgatttcaataggcaattcggtatcttcttctagccatttcactaaatttaataatacctcttcctcatttattgccgtaatagcagcgatgcatgtttttttgctcgggaaaacaatgaaaacttggtcggattctttcatccgcattacacgtgcaatatgatggaaattttctcctgtaatggccagtgtatcgttatcattctctagctcagatgttacaaaataacgctgcatttattccactcctcgtttggaaataatcgcaacccaatccccttgttgctccattttttcaataataagtccagcatttttaagtgcttcttcgactactttcgctttgtcttcaataattccggaagcaatgaaaaccccgcctggtttgagtgctttataaacatcttctgggaaaagtaaaataacttccgctaaaatgtttgcgacaacaatatctacatttgttttgttaatatcttgaagtagattattttgttttacagtaataatgtgttctgttttatttaaagtaatattttcttctgctgcacgagtggcaatttcgtcgaggtctgttgctaaaatagatttagctcctagtttggcactggcgatacttaagacacccgaacccgtaccaacgtcaatgacttcatcccctggttgtaaataattgctcagtgcacgaatacaaagttgtgttgtcgggtgtgtccctgtaccgaaagccattcctggatcaagctcaatgattatttcgttagcagagggtgtgtatgattcccaacttgggacaatcgtgatacggtctgtgatttgaactggatgatagtattttttccacgcagtagcccactcctcatcgtccacatcatttacaacaaattggaacttgcctagcggaatatcaaacgtgctgagatttttcaatgtttgttcgatttctgggatttgctcgacaaattcggttgtttttaagaaataagctttaatgatgacgccatcttctggataatcttctcgtctaagcgcataaatttctccaaatttatcttcgcgctcacgtaaaaaatctgctacatcttcaattgatacgcccgctgcgccaaattctgttaaaacattcgcaactggctccactgcttcattcgtagtatggacttctacttctgaccattccatttttcaacactcctttagtatgtagaaaaggtcgatggttgcttcttgcacaactatcgacctctacgttcatcaatcgcctttaaaagctcgtttcattttgtcaaaaaatccagatgtttgttcgtctactttgtctccagtagtggaagcaaattctcgtaagatttctttttgtttatcatctagttttttcggaacgattactttgacgattacgtgttgatcgcctgttccgtttccacgaagatgcggaacacctttgccacgtaagcggaaagttgttcctgtttgagtaccacttggaattttcaaacgaactttaccgtgaacagttggcacatcaatttcgtcacctaatgtagcttgtacaaatgtgattgggacttctacgtaaatatcgtctgcttcacgttcgaaaaactcatctggaataacgacaaacaccacatataaatcgccgttaggtccgccgttaataccagcttctccttcaccagatacacgcatttgttgcccgtcgttcacgccagctggaactttcactttgatttttttcgttttagttacacggcctttaccgtgacaagttgggcatttctctttgatttctttaccagtaccattacagtattggcatgtccgtttattaactacacgaccaaatggggtattttgttccacgttaatggaacctttaccaccacaatggctacatttttcaggtgttgtccctggttttgcgccggaaccgtgacatgtatcacagttttcttcacgaggaatttcgatttctgcatccttaccgaaaatagcttctttgaatttaaggcgcattgtatattgtaaatcgctaccttgtcttggggcatttggatcttgttgacgcccgccgccaccgaagaatgtgtcaaagatatcttcaaatccagagaatcctcctccgccaaagccgccacctgcaccacctccgccgaagccttggtttggatctacatgcccatattgatcatattgtgcacgtttttgtgggtcacttaatgcttcataagcctctgatatttctttaaatttttcatcagcgcctgcttctttatttatgtccggatgatactgtttggacagtttccggtaagctttttttatttcgtccgctgaggcgcttttggaaataccaagcacttcatagtaatctcgttttgccatccgccatcactcctgtccatgatagatttttatagtcctaacgtattgtaacatttgaaagagatgttgtaaaaactttatttcagataaaaagtcaaagccacagtagactttgactcgttatccttaccttaaaaaagattatttgttttctttgtcgtcgtcatttacttcttcaaattcagcgtctactacgtcgtcattttgaggagcttcttgaccttctgcgccgcctgccgcttgttgttctgctgcagcttgttcgtataatttaacagatagattttgaacgatttcgtttaagctttctgttttttctttaatagcatcgaaatcttcacctttaagcgcttcttgtagctcatcgcgagctgcttctgcttttttcacttcttcttcttcaactttgccttctaattctttcaaagttttatctacagtgaatactaattggtctgcattgttgcgaagttcagcgttttctttgttctttttatcttcttcagcattagcttcagcatcttgaaccattttttcaatttcttcgtctgttaaacctgaagaagatttaataacaatgttttgttctttaccagttccaaggtctttcgcgcgaactgttacgataccatttttgtcgatatcaaatgatacttcgatttgagggattccgcgtggtgctggcgggatatccgctaattggaaacgacctaatgttttgttgtcttttgccattggacgttcaccttgaagtacatgaatatctacggctggttggttatcagctgctgtagagaaagtttgtgatttagatgttgggatagttgtattacgttcgataagtgtagtcataacgccacccattgtttcaataccaagggataatggagttacgtcaagtagtacaacgtcttttacatcaccagtgattacgccaccttgaattgcagcacccattgctacaacttcatctgggtttacacctttatgaggttctttgcctaattcttttttgattgtttcttgaactgcaggaatacgagtagatccaccaactagaattacttggtcaatatcgcttgcagataggtttgcatcttttaatgcttgacgagttggcgcaatagtacgttcaactaagtcatgtgttagttcatcaaatttagcacgagtaagggttacttctaagtgaagtggaccagcttctccagctgtgataaatggtaaggagatttgtgtgcttgttacaccagaaagatcttttttcgctttttcagctgcatctttcaaacgttgaagtgccattttatcttggcttaagtcaataccattgtcttttttgaattctgctactagatagtcgatgatttttttatcgaagtcatctccacctaattcattgtcaccagcagttgagtgtacttcaaatacgccgtcacctaattcaaggatggatacgtcaaacgtaccaccaccaaggtcaaatactagaattgtttggtctgtttctgttttatccataccgtaagcaagtgctgctgcagttggttcgttaataatacgttctacttcaagaccagcgattttaccagcgtcttttgttgcttgacgttgtgcatcattgaagtaagctggtactgtgataactgctttatctacagtttcgccaaggtagtcttctgcataactttttaggtattgcaaaatgattgcactaatttcttgtggagaataatcttttccttcgattgtttctttatagttagtacccatatgacgtttaatggaactaattgtatttgggttagtgattgcagcacgtttcgctacttcacctacttggcgttcgccatttttgaaaccaactacagaaggtgttgtacgtgcgccttctgggttagggataattttagcttctccgccttctaatactgctactgcagagtttgttgttcctaagtcaattccgataattttgctcattgttatttcctcctgttattcagtaattattttttattgattcacttttaccatagatgggcgtataacccggtctttaagtttataacctttttgaagttccgcagtgatttcattgcttcctgcattttcatcactatcttgcataacagcttgatggaaattcgggtcgaattgttcgccgacagccggaattacttcaatgccttctttttcaaaagcaataagaatttggttgtataccatttccattccttttaaaatttgtttcacttcttcttgatcagaagtcgttgcaagtgctttttcaaaactatctagtgcaggaagtaaatcttgcgctaggctttgcgaacgatatttctgactggcatcacggtctgcaatatgtctttttttgacattttcgaagtccgcttgcatacgaagatagcgattttcaacttcatcaagtttattttcaagctctaaaatctttgcttgttcttccgttaaggtatccgccgtagcttcctcttcaacagcttcttctgcttcatctaaaatgtttaattcttcttgttcgatttcatcagctagtctttcttttttgttctttttctcagacactttagccacctcctgaaaaaacttatgctttttcagccttcctaattttggttatcacgataaagtttggttaacacatcggttaaatctcgactcattacatcaacgagtcccatcattctgctatattccattcttgtgggccctaggagtacgataccgccaacacgttcgccagcaatattatacgtcgctgtaatgatactacaatcttccattagactattattgttttctcggcctattttcacttgaagaccatcgggaatatccctaaacaattcatacacatcttgttcttcttccatcaaatgaagcatctcacggactttattaatgtcatgaaattccggttgatttaaaatattcgtttttccaccgaaatacactttttgttgacttgcttgagcaaaagaatcggaaaatacatgcataaagctttcgtaatttctaacatgctttccaagtaattcctttacttccattggtatttgtacttttaaatcatcaagcgaaagccctactagccgttcatttaaaatgttgaccatacgttcaatatcggagagcgttgtgccttccggtattgtcacaagatggttatcaacatgtccttgatcagttattaatatgagcattgcttgaaaattatttattggtacaaatctaaagccacttaaatgatttttcgtcgcttcagggccaagcaagatggacgtgtaattggttaaatcggataacattaatgctgaattttggataagtccttccatttcgtagtaattctctgaaaagaaggatcgaatcatttgcctgtcggatttatctagcttttttggctggagtaagtaatcgacatagaagcgatatcctttctctgatggaactcgtcccgacgaagaatgcgtcttttcaataaagccgtattcttcgaggacccccatttcattacggatagtcgcggaactataaggcaaacctttttctttcagcaaattctttgatccaaccggctgaatagtccaagtgaaatgatcgatgatggcacggaaaatcaaaagttgtctttctgttaacatagcaatcacctcttttagcactccataacgtcaagtgctaaatacaagtataaatttaccaaacaattccaccttagtcaaccgaaaacactcgatttcagactaaagtaggattgtttggtcaaaataggtcaaatagtgcggttttagaggaattcttggaatacattatttcccaaaaatcttccacttcttgtaagcgccacattttcttcgttattttcgagccagccttttgcggttgttttttgaattgcattcgcaaatgttgcatctaaatcttggccgaatttttgtttgaaatgttttttatccacgccgtccacttttctaagtcctaaaaacatttcttcttccattttttcttttaatgtaagttctttttgttgaaatgttgggagtatattctcttgcaaaggttccatgtattttttgattgggccgaaattgctatagcgtgtattgcctacatagccatgtgctccggcgccaaatccgtagtaatgttcattgctccaataagtgatattgtgtttactctgaaatccttctttagcaaaattactaatctcatattgtttacgaccgtgcttttccatttcgttgagaagtaaatcgtacatatttgcctcggcatcctgaccaggaaggaaaagttttcccttttgcataaggttgtaaaaaatcgtttttggttcgatgatcagtgaatacgcagagtaatgcggtaaatcaaggtcaagcgcttgttttaatgtatcttggaaatcggcttctgtttgtcctggcaagctaaaaattaaatcaatgcttacattttcaaatccgattttgcgcatattttcgacggattgataaacatcttttacagtatgaatgcgaccaatttttttgagaagttcattgttgaagctttgaacacccatgctaatacgattaactccgtgatcttgcattgcttgtagtttagatagcgaaagatctcctgggttggcttcaaacgaaaattcgatatcttttttgagcggcagagtgttatgaatggcggtgcagagtctcgcaatttgcgcttcgtttaaggttgtaggtgtgcctccaccgacaaataccgtgtcgactggcgctattggtccttttgcgactgttaattccatttctttaatcagtaaatctacgtattcgtcgaccggttgtccttctaagaatactttattaaaatcgcagtaatagcaaatatgttcgcaaaacggaatatggatatataccgcggaactttcattactcgataggtttgtatttatcatttttatcaattccttgcacttaaaatttgcttcgttatccattagtcagtttaacatatttttcagtgcttttgtgcaggattcgcttttaatctaataaaccatactttgccaaactatccactgcagcaagaacggcctcttcttttgtcgaaatcggcttccatcctaaaacatctctcgcttttgaattgcttatttggcgattcatattaatcatcaactctccttctttggcgtgcttactaaataaagctgctgctcttatagctgcatttggtaatgttttcttcggcattttatccactagttcaggacgttctcgttgaagcaaatgcgcaatatctgccatactaatttctccgtcagctgatgcaataaaacgttctccgtttgcttctggggtaatcattgcgcgaatatgtaaatcggcaacatctcgtgcatctactacgtttaacggaatatttatgacgcgtttcatagaaccgtttaacagattttttaataagtcaaagcttccggagacgtgattgctttgtgatggaccaaaaatggcaaccggattgatggtagcaaattccaattctgtttcattttccatgaatttccaagcttctttttctgcgattagtttagatttttcatatgctgataaacctttagcgagttcatcggtccaatatgcttctgttgtaatgctatttttatccgcgttgctaaaaccaatagcgccaaaattcgaagtcataactactcgttttacttttgcctcttttgcggcctgtaaaattcttgtaataccttcgattgctgggcttattaattcttcttcatttttaaatttgccgaaaaatactggagatgcgacacttagcacatattcacaatcgagcattgcttctttccaaccttcatctttggataaatcaagttcgacaaaagacaaatgcgtaaaatccgttattccattattttgcaatatttctattactttttctttgctttttaaagagcgtacggttgttttgacttgatagccttgttgcaataattgaaagataatatgcattcctaaaaatccagttccgcctgttactaatacattgtttttcatcgtgaattcctccaatagtagttaattttgcttattttctttattaactttatacttactctaaaccctagagtatagtgtagggcaagtaaattatttattggaggaaaaaatgacttattctattaaagaagtatctaaaatatttaatttgtcgatttatacattgcgttactatgataaacaaggtttattgccgtttgtttctaaaaaccaatccggctaccgtgagtttacggaatcagatttaaatttaattcatacgatttgttgtttgaaaaatactggaatgccactaaagcaaatccgcacatatattgattattgtatggaaggtcccgtttctattgaagctcgtaaacagttactcttggatcatcgggccgccgttttgaaaagtttagaggatttaacagaaaatctaaaagaagtcgatgttaaaatagcgaaatattcgtctcctgatgcggtagaaatcattactgccgagagaaattatgtcagtatggaaaagaaaaagcatgatttgatttatccgtataatatataaaaaagttgtgccgtgaacatttctgctcacagcacaacttttttattatttggattcgtccattttcaagattgccatgaaggcttcttgcggtacttccacagaaccgatttgtttcattcgttttttaccttctttttgtttctctaagagttttcgtttacgcgatacgtccccaccataacatttagcaagtacgtttttgcgtagtgctttaatagtagaacgagaaacaattttcgttgcaattgctgcttgaataggcacttcaaactgttgtcttggaataagttcttttaatttctcaacaatgatttttccacgctcgtaggcaaaatcacggtgaacgataaagctaagtgcatctactttttctgcatttaaaagaatatccattttcacaagtttggaagctttgtagccaattaattcataatcaaaggatgcataaccttttgtagatgatttcaattgatcgaaaaagtcatatacgatttcggataatggaatttcgtacacaatactcacacggatatcatctaagtactccattgtaatgaagtttccacgtttgttttgtgcaagttccatcactgcacctacataatcatttggaaccataacagttgcttttacatatggctcttctacgctttcaataacaccaggttccggcatttcagcaggattatcaaccacgatgttggaaccatctgtcaagtttacatgatagataacacttggagcggtggtaattaaatcaatgttaaattcacgttcgattcgttcttgaatgatttccatatgtagtaatcctaagaaaccacaacggaaaccgaagcctaatgcttgagaagtttctgcttcaaattgaagagcggagtcatttagttctagtttttctaaagcatcacgaagatcgttatatttagaggagtcaattggatatagaccacaataaaccattggatttaatttacggtaaccatccagcgcttcttctgctggattattcgcaagtgtaatcgtatcacctactcgtgtatctccaacattcttgatcgcagctgttaagtaaccaacgtcaccaacaagtaattcgtcacgtggggttgcctttggtgagaatacgcccacctctgttacttcgaattctttgccattggacatcattttaattcgatcgcctgcttttacaacaccatccatgatacgtatattagcaataacaccgcggtacgcatcaaaaacagagtcaaaaattagcgcttttaacggtttgtttacatctccagaaggttctggcactttttcaacaatttgttcaagaatatcttcaataccaatacctgattttgccgaagcgagtacagcgtcggaagcatctaagccgataacatcttcaatttcttcacggactctttctggatcggccgctggtaaatcgattttgttaatgactggtaaaatttctaaatcgttgtctagtgctaaataaacattagcaagtgtttgtgcttcaattccttgtgcagcatctacaacaaggattgctccttcacaagcagctaaacttcttgatacttcataggtgaaatcgacatgtccaggagtatcaatcagatggaaaatatatgtttctccatcttttgctttatattttaattgtacagcatttaattttatggttatcccgcgttcacgttccaaatccatcgaatctagtagctgatttttcatttcacgatgcgtcaaagcacccgtttgttctaaaatccgatcagcgagtgtagatttaccatgatctatgtgcgcgataatcgaaaagtttctaattttcttttgtcttgcattcatttcttctttgttcatttccccagctcctgattagaactcatcgcataaatccgatggcaagctatccttgattatatcagtagaacgcttaacattcaatgactacagataaatttaaaataaaatagaaagtattattgcaatatggctgtgatttcggtataatagcatttgttctgatataatttaaaaaggtatgttatatgaaataaatactacctcattagtttggacggaggtgaatggaatgccaaatattaaatctgcaattaaacgtgtaaaaactgctgaaactcgcaacagccgtaatgcatctcaacgttctgcaatgcgtactgctatcaagaaatttgatgaagcagctgcaaacaacgcggacaacgcgaaagatctttacgtagaagcatcgaaaaaattagatagcgctgtgagcaaaggattgattcacaaaaacaatgctgctcgcaacaaatctcgcttagctgctaaattagctaaataataccgagttcggtataaaacatcacaccttgtgtggtgttttttgtttgtaaaaatagctttgtcttaaatgacaaagctattttttatactctcttctgccgattatcctgtaattcgaataagaaccattcgagtttctgttctttatcgccaaagccagttttcatttccaagtctatttcagctaatcgttttaaagcttgatttaattgtaattccgtgaaattcttcgcttgttttgatgctaacttaacgcgaaatggatgcacttttaatttagttgcggcttgttgctgggaatatccttgttgttctaataattttaattggttcaacaatctgaactgactagaaattaatgccagtattttgataggctcttccttttgttttaataaatcataataaatccgaagtgccccgctgatatccattgcaatcatcttatcaagtaataagaagatattttgctcaagtgaacgtacaactaaagattctacatcctgaatggtaatttcttttgtatcaaaacaatagagcattaatttttgcagttcattcatggccgtagttaactgaccgctagttaattctatcagtcgagtaatagcctcttgtgacatttgcatgttgttctcgcttaattttgcttcaatccatttttttaactcattctcattaggtcgtttagcttctataacagtagctgttttcttgagtaacttagtaagctttttacgctcatctaacttttctacccgtgctacaaagcataatactgaataatcaactggttcattgagataagcctctaattttgcagtatcatgttccactttgtttttacttttttccgttgttaaaaaaagtggattattagccattactaaacgtttatcaccgaaaaaaggcatactttccgcttcttgaacgaccacttctataggcatttcttctaaatctaaattggcatagttaaattcaacttcttcgccttctaaaatattatctattaaaagttgtttcgtttcattaataatataatcttctgtaccgatgattaaatacaccggcgttatttttttggagcgtatctgtttccattctggcagcattcatttcgcctcgcttcactcttatttctctttctatggtaaaacatgaaataagagatagcaagttttatttcaaagtcgcttcaaagccttttccaaaagtataaattatttcgccttgtacatctgttcgtaaaattgttactcctgccgtttctagcgtattgatagtttcttcgtgtggatgaccaaagcgattgtttaacccgcatgaaataactgcaaaagtcggcttcactttttgaataaattctttggaactggaggtcttgctaccatgatgccctactttcaaaatatctgctttgataggttgttctgatatgcccatctctccgttcgcttctaaatcaccagtaaaaagccatactttatcatctaacactgcttttaatacaatagagtcatcatttcctccttctcctgctttatcgggatataggcattcgaaactgttttcgccaatttgccacttggccccggccaaaataattgtttgtttcacttttggcatcgcagcgagagcttctttcatgatgggtttattttctgctcctttagcataaataagttcgttaatagtaatgtttttctgtaaatcatcaagcccttccatgtggtcagcatcactatgtgtaataattactttatctaagctattaattccttttgactttaaaactggagtaagtgtactttcaccaattgtaaatggctttcttttcttagcccatgcttctttttcaaatggtagttggcccccagtatctatcaaataattcccttgattgtatggcagttggattaaaatgctatccccttgccccacatcaataaaactaacttttccactgaaattaaaactagaaaaataacataagaaacaaaaacaaattaatataccaaaaggaaactttttcttctgccactggttgaagaagatgatgatagttataatgattaacattagtataaggatgtttggccttcctgttacaatagtctgatgcggaatcttggcaaaaatgtaggttaacttttctaccaattgtataaagaatgtaagcactacttcaggaaaatgaaatatttctgctgaaaaaaaagacagtacaaacacagttaggcaacctggcaaaatgataatcgtgaaaataggcacataaattaaattaaagaatatccctacccatgaaaatgaataaaaatgatacatcatgacaacggacgacataatggttgaaatgaaagaaatagaaagtgacttagtaaatgcgttctgctgttgggcaagtatttgccttgacgataaaataataccgaacgacactgtataagatagttgaaaacctacttctttcatgacgtacggttgtaagaggaaaaatagaataaaggataaacaaatggcagaaaaagaactccatttagtagtatatttttctgataataaaagtaatgctgtcattgtagcagctcgtatgactggcggatttgctcctgtaaggataacgtaaaatggtaagaaaacaagtaagaaagtaatggctcgctcacgtgtaacgccaaattttagtaggagaaagtatattgcccctattaataaattcacgtgaaggcctgagatagctagcaaatggacaacacccatttgttgataaacttcatacatttcgggggaaaaaccgcttttttctccactaattaatgccagacaataaggagaaatggttggggatattttttcggttaaatgggtaattattttcaaacgtatattttgaagcctcattaggaaagatggtgagaaatgttctgaaatagcaagattacttgctcgaagtatatagtgtacattctggttctttagataagtttggtaattgaattggttttgattacgatggatggaaggtgtttctacattcgcataaacagaaataaactgtccgtaatggagcttttttagtttttgttgttcctcttccgttgtaattttataactcaattgaaatttttctttttcgcagcgtacaaaagcttgaaaactatcaccatcaatttttaaattatctataatttgacagttcccgctatattcagtcgctgtaaatgaggaaatattgaatttttctactacaaacaaaaaactataggttagaagataaatgaggacaaaaagaagaataattttggattttttaataaaagcgattaaaccgagcaaacaaatacatatgggaacgatagagcttgtaaaattcgcacaaataatagctaaaacaagcatagctaaatatcgctcgataacgttccctccctatttagtttaatttctctgagatgctttgataaagttgttctgctttttctggatcaatatttacttccactgctgcttcttttactaaagtatgcattttttccccgttccaattgtttacttgaagaacagattcatcaaattcgactttttgtaattcaacaccagcaatgttaaataattctagagcgtacggatggtttttgtagtcttttgcgaaatacactttctttatgcctgcttgaataatggatttcgtacaagcaagacaagggaaatgtgtgacatataattcagctttatctgtcgtggcaccaaatttggcacattgtaagatcgcgttcatctctgcatgtattgttcggatgcagtgaccgtctacaacataacagccgtgttctgcacaatgatcgccaccagcgatggagccattataaccgcccgctataatacgtttatctcgaactattgtcgcacctaccattaggcgtgtacacgtgctccttgatgatattagatgactttgcgccataaaaaactgatcccatgcgattctttgcacattaaaaactcccttatgatttgataaatattagtataggtgtttagcaggaagttcgtcaaccacttttattaattaacatccaaatattcttttaatttctctactgttttttcgccaatacctgaaacgttttttaaatcttctattgtttgaaacaaaccttctttttctcggtactctattatcgctgtagcttttgactctccaattcctgggacttgttgtaaatcggccttatttgcgctattaatattagttttttcaagattgctagttgtttcttctgcgctagctccttgtaatgttggaccttcttctccttttttgtaaacataaatactcatctcgtcttttagtttttcagctaggtttaatttaccgctatcagcttcatctgtaagccctccagcggttttcactacatcttgaactctagcatttacgggcaatttatacacacctggtgtccgtatggctcctttaatatcaatatagacgtaattcggtaatttcacttcttccttccctggcttttcttctttggttgctgttggattagcagtaactgtatctgttttaccatctggtatccaaatataaactaaaccagcacaaagaatagcaatacctattaagatataattcttgtatttttttactaattccaccatccatatcaccgtccttaatatactattcgccatgcaaggacaaaatcctttttgatagcttaaggtgaaaatcgcacaaaaaaagaaagtaatattgaaaaattactttcttgctgcgaaaaagattctttcgctcgttttattgggtttttcatgactgaaatcagcataaatatcaattttcgtaaaaccaaatttttttaacaaattttcataagtagcaatcggataggtccgctctttatgaagttcatccacacggttatatgtatcatcttcgcctaaaatatagaaggtaagttcatgttcgatggagtgtggatgttcaccaggaaatgaattccaaatcgtcgaaatttcttcatcgctatctccataagaataatctttaaacccttgctctattttaaagacggaatgtacatcaaataaaaacaaaccatttggttctaaatgcgctgaaactgcttgaatcgtagcttcaagagcttgttctgtttccaaataattaagtgaatcacagaagcatgtaactacatcaaacgtttgctttaatgctaatttggacatatcttgttctataatcggtaaatcgatttcagctgccgctactttttctttagcaactgcaaccatttcttttgataaatctacaccagtaacttgatgaccggaaaaacttaatcgtagcgcgaattcagctgttccacaagccaaatcaagtacttttttaggcgcatctccaataaaatcagcagaaaattctagccattcatcataaagttcggaatccattaatctatcatagaaacctggaaaatattcgtaactcatagtcatttctccttaaaaaaacagacgagaattccccgcctgttctgttttttattaagaaataaacgcagcggaaacgtccacgagtggcgcatctccccaaagtttttctaagttatagtaagaacgttcttctttatggaacacgtggataataacatcacctaagtcgattaaaatccattgtgctgcatcaaaaccttctaaacgttttacatctacttggttttctaaagctttttctttaatttcacgagcgattgcttgcacttgtttgtctgaattaccgtgacagattacaaaataatccgcaaagcttgataaccccttcatgtctagtgctaaaatatcctctgctcttttatcgtctgctgccttagcggtcagcattaatgtatcataactgttcaaattattaatagtctccttccaaatttaaattaacaaaataattataggcatccagtgtatctggaaaaaccaattgttgttttttaaccaagtgcgtaatcgtattcgataaagcgaataacattgcttcgtccagtgatttaagtgctagtctacgcgccttatacacgccaggaaatgttcttccttgttcggtgtagtcggctaagtaaataagtttatcgaaatcagacatcgttgcgcttcctgtcgtatgcagacgaatcgcttctagtatttctgtatccgtgataccaaattctttttctgccagatatgcgccaactggagcgtgccacagcgaatgatgaaaagaaagcaaacgcggatcataaccctcgtcctcgatgatttttctcgctttatcatcgtcatagtacttggcataatcatgtaacaaagcggttattcgtgctttttctacatccatatgataatgttctgcaagttctacagctgctttttctacgcctaaagtatgtttaaatcgagcattaggcatagctgcttctactttttttagcacttcatttctttccataaagttgatgctcctttatatatgaccaaactttttctggtaaaaaggcttctgcgtgttcgatatcattcctaatttctgtggaagaaattgttgttttcggcatgtcgattttaacgacatcatacggaacttctggttgataaagtgggcgattcaccccaacgaaggtcaccatttttactaagtcatctatatgataccactttggcaaatattctaccatgtctccgccgataatgaaataaaaatctgtatccggctgttcgattatcatatcacgcattgtatcatacgtataggactttcccgtgcgcatgagttcgcgtgtatcaatttcaaaagaatctataccttctatcattaattgaagcatttctacacgctcattaattgaagccataccactgatatgtttatgaggcggaattttattaggtagaaaaagaattttctctaactccagttgcttcttggcctcttctgccatgtggaggtgtgctaaatgcggcggatcaaacgtcccacctaagataccgactttatgtttcatcgaaggttcctccagatttatggcaatttaatttgttgtttatttacagaagttttgtatagaataatcgttctaccaattacttgaacgatctccgcgcctgaacgagcgctaattttttctgcaacggtttgtttatcttcttcacagttttgcagaatcgagattttaattaattctcttgcttctagtgcttctttcacgtggatgattaagtttggtgatacgcttccttttcctacttggaaaattggttggatattatgcgcttcttttcttaaaaaacgtttttgtgtagctgttaacattagtttcctcctaattgttcgagtactgcttctttcatcagtgatcgctctggttttatcccagtccatatttcaaaggcaagtgccccttgattaacaaacatcggtaagccattttgggtaattgctccatttttctttgcttcttttaaaaaagctgtttcggctgggttataaataatgtcagaacaaatcgttccttgttttacattagccagcgaaattggacttttgtttttggaagcttctagaccaatagatgttgtttgaatgataatcgtaaaatcagccaattgcttttctgcttcttctagtgtgatagcgtgatggttattattatctttcgtcatttctatcgctttttccgttgtacgattggcaacggttattttagcatcggtgtgagttgagagtgctaggtaaatcgccttacttgcaccacccgcaccggtaattaaaatagaatcatcttctgtaattgagcgaatttcttctaatccttctaagtagcctttgccatctgtattaaatccgtaccatttgtcttcttttttaagcaccgtattcactgcgccagaagctgctgcgagattatctagttcatctaaaaatggtaaaatacgctctttaaatggtgttgtaatattaaaaccacgcactccagaatccattagttttttgatttctgtttcaaaagcgtcttcttctattaaaacagagttatactccgcgttcattccaagttcttggaaaatccgattttgcatagctggtgataacgagtgacgaattggatttccgataacaacatatttttccaaatgacaggcctccttagttttaaacgagtgatgtccggatagttgcgctcacgccttctggaacccaggcagttactttcgcgccaccttctgggattgtcacccagccaagtccagaaaagacaatatctgctttttcttttacagtaaaggaatatggcacgagtttaggtagagttttcatatcttcttcagttggcggttgaagtactagtccagcctgtttctcatataatgcctctgctttttctaatttcgtccggtgaatcggtaaattgttggatacataaacaactagcgatttacgaccacctgatacgtaatctaagcgagcaagcgcgcctaaaaatagggtttgttcttcatttaattggaagactgctggtttgacttcttttttaggtgtaatagcttttaatgttgttgtatcaatgaagtgtgccatttgatggtgattgataattccaggtgtgtcaacaagcacattgccatctgctaatgggatttcaattttatcaagcgttgttcccggaaattgtgatgtcgtaatcacattgttttctccggatgcttgtttaataatccgattgataagcgttgatttaccaacatttgtacaaccgacaacatacacatcttgcccattgcgtaattcatcaattttctctaaaagggtatcaaaaccgtggcctttttcagcgctgactagtacgacatctgtcgccgctaagccttgctctttggcacgtgttctcatccaacgtgtcaacttatcgcgttttaatgattttggtaacacatcttctttgttaccgacaagtaataccggattgcttcctgcaaaacgaggaagtccaggcaaccaactaccatcaaaatcaaaaatatctactacatagacaattaaggcttgtttcgaactaatttgatttaaaatgcgtagaaaatcatcatctgttagcgcaacatcttgaatttcattgtaatgctttagacgaaagcatcttttacaaataacttgctcattgttcagggatgattttggtgcatagccgattttatcagggtcttctgtttgaataaccgcgccacaaccaatacatctaacttcttctgtcaaagtgattcctcccacttaatttggtttttctttgctaatcgttttaaaataacgctttccatcattcgatttaattttgtcgccataccatctgtttgttttacagggcgaacaaaaatagttgttaatttttgacggtttccaccgaatatatctgtcataatttgatccccaatcatcacagtttcttctggtgtcgcatccatttcttttaatgcccagcggaaattagcgcctaagggtttttttgcccgcgctaaataaggaacatcaattgcttttgccacacgagcaactcgttcttcgttattgttagaaaaaatcattactttgattccttcttctttcaatatagtaaaccagttgataacttcatccgttgcgtctagttgatcccatgcaagcagcgtattatcaagatctgtcaaaatagtagtctttcccattttgcgaagttgcgctgctgttattccaaatggagtattcaacattttatctggtgagaattgctttaacacgtattggcacctcattcttttatttagtacagtctattctatcatacattcaattagactaataatctataaattttaccatctttctgcttattttacaaaaaaaccttagaaaaatgctataatatgaaaggaaacgttatttttaaggaggtaaacaaatgtcaaaagattattcactaacatgggatttagaaaatatatatgctggtggcagcggctctgaagaattacaacaaacgcttcaagaggtaaaagctgatttagacagctttgtcgtaaatgtttcggagtgggatgttcctgaaaatgtggaagcctctgcagaatttttactactagtgaaccaaaacgcagatatctctaaaattttactcacagcaggttcttttttagaatgtcttgcttccgctgatatcaatgatacgcgcgcaaatgaactttcagcattaatttatcaatatgttgcaaccctagctacagctgaagatgaatggcatgataaattcgcgcaagtttctgaccgcgtttgggatgaattaatggaacaaaatggtttatcgcaaattagctttattttaagtgaggcacgtacgaatcgtcgtaaaaaagggagtaaagaacaagaagcagccattaattctttagcggtcgatggttatcgtggttggtctgaccattacgataccattgttggtaaacttcgcatgcacgttactattgacggagaagaaaaagatgtttctgccggtcaagcgctaaacttattaaatcaccctgatcgcgcagttcgccaggcagttttcaaagaatacacacgtgtatggcaagaagaatctcgtttatttagcgatacgttaaatcatttatctggattccgcttagctacatatgatattcgtaaatgggataatatcctagatgagccactggcaattaatcgtttagatgaacaaacgttaaaatctatgtggaatgttatccaaacgaacaagcctacttttgttcgattcttagatagaaaagcgaaattacttggccttgaaaaattaagtttttatgatgtagaatctcctcttgtattttcaagtaaacctaagaaatatacgtatcaagaaggcgcagaatttatcattgagcaatttaataaattcagcccaaaaatggcaaacttcgcgcaatccgcttttgaaaaaggttggattgaagctgaagaccgtgataataaacgtcctggtggtttttgtacagacttccctgttgaaaaagaaagtcgcattttcatgacgtatgatggggctccaggtacagtcgctactcttgctcacgagcttgggcacgcattccattcacacgtgattcgcgatgaaccttttgaaaacactgattatgctatgaacgttgcagaaactgcttctacttttgcggaaatgattattgccgatgcgtctgtaaaagatgctaaaacaaaagaagaaaaaattacgttactggaagataaaattggtcgtagcattgctttctttatgaatattcatgctcgctttattttcgaatgtaatttctatgaagcacgcaaacaaggcgtagtttccgttgatagacttaattccttgatggaagaagcacaacgagaagcgtatttggatgccttagatgagtatcatccacagttctgggcttctaaactccatttttatattgccgatgtaccgttttataacttcccgtatacttttggttacttgttctcgcttggtatttaccataaagctcaagcagaaggcgctagttatgaagataagtacattgcgctactacaagacactggctccatgacgaccgaacaacttgccgaaaaacatctaggagttgacttacgtaaagctgacttctgggaagaagcagttgctctggcagccaaagatgtggaagatttccttactttaacagaagaatacgtaaaataaaaaaagcctggagcttaaaaactccaggctttttttaaattgttttaagcaattcgatgatacaagttgcggattgtttcgctgctaagtgaataaattcatcaaatgaaatagttgcttcttggttagctaaatctgaaatagcacgaataattaagaatggaatatcaaattgataagcaacttgggcaattgccgccgcttccatttcaactgctttcacatctggaaaaaaagtgcgaattatttcatgctgatcaggacgcataataaaagaatcattcgtaacaacaagtccatataccgctttgttttcgcttgtagcaaaatattcacggtaaatggtttccgcttttttaagaagtacagcgtctccttgataaaatgctggcattcttgggacttgtccgtatgtgtaaccaaattccgttacatctacatcgccgtaagctagtcggtcagaaataataacatcgccaacagctaaaccttcagccatacctccagcagagccagtattaatgattacttctggtttaaagcgatctgccataagggttgttcccagtgcggcatttactttaccgataccagactctaaaagcactacttctttgctagcaatttcgccaatgtaaaatttagctccgccaattacaatttcttctacgctcgacatgctattttttaaaagttctacttcttcttccattgctccgataataccaattgtcattatgtaacctccaaaaaagcacagtcgttaagagctaacttctgtgcttttatcttttgtcgtttgttttaagctcttctactttggtaggttgccatccttcaccgtcaacccaggtaatataaacacgatatgctttgtccgggttttctttagtagaaagtgtaccaattgcttgtgtcgcaggatcagctccttgctctacaaaccaaagcgatgtatttgagactgggatatctgttgctacagaaaaagctttacgtttttcttgccagtctacacttgtggaactgtacgaattcacatgatcaccggtttgttctgtaccaataggtttccaatcttttgtaataactttcgctacattgggatcatcgctttcggttgtttcagttgtcttatcatctgaagaatcttttttcttttcggatgatttagcggcatcttcttttttcgcagtggaagatgccgttttgttttcttgttgtgcgggatcgctctctgttttaaacagcacaaaatacaaactaccaatgataagtaagcttaccacgataattaaaacgtttaaaactaaattagtcttttttcgttttgtattttgctgggagcgggatccttccaccaagttttgtttaattcgacggttatttgattgtcgtttgtctgccatttgcattcaccaccttataagtaaccgctgtacaaaaacatcagataatattaagatgcagtgattttttcgattttaacgctcatgtcacctgctggagtttggatagttacttcttccccttctttatgaccaagtaaacctttggcaattggagaatcattggaaattttaccttcaaacgggtctgcttcagcgctacctacgattgtgtaagtttcttcttctccgtctggtaattcaatgaaagtaactgtgtttccaagtgttactaaaccattatgtgcttcagcagcatcaatgatttgtgcgttacgaatcatattttcaatagtagtgatacgaccttcaacaaaagcctgttcatcttttgcggaatcatactcggagttctctgataaatcaccaaaactacgggcaattttaatccgttctactacttctttacgttttactgtctttaattcttgtaattcattttctaattttgctttcccatctagggtcattggaaatactttttctgtcgccaatcgatttcgctcctttttgtttgttcattattgtatagaaaagcacggagatatcgctccgcaccttcatcaaaaatattactactcgtcagaaagattaacatgccacgctagaaatagcaagcaattgtctctctttttactaggaaaattttaccttaattttctctatttgacaagtgatacctgttgtttaaacatgtttttgcaagatggattcaatttttgttgtcattaagtcgattgctacgtgattctctccgccttctggaataataatatcggcaaattttttcgttggttcgatgaattcgttgtgcattggcttaacaacagaaagatattgctcgataacggaatccattgtccgaccacgttctttcatatcacgtaaaagtctgcgaataaaacgaatatcatcatcggtatccacgtatactttaatatccattaagtctctaagccgtttatcttctaaaattaaaatcccttctaaaataatgacttctctaggttcttggatttctacttcttttttacgtgtatatttggcataatcataaatcggcttttcaatggattcatagcgacgcagtgctgcaatatgtgaaatgagtaaatcagtatcaaaagcaagtggatgatcataatttacttttaatctatcttcaaaactaatattggcttgatcgtgataataaacatcttgtgcaatcatcaaaatcgagtgcccgctaaaatgattacaaatggctttcgttacgctggttttaccggaacctgaaccgccagttacgccgactacgattggtttttttgtcatgatacgcctccagttttctttcttttagaaatagataggccgtcccctagcggaatggtcgttgtttcaaaatcaggatgcgtcactaaaaaatcgttaaaatggcgcattttcctcgcaacacgtaatttacgctgtttttctggtgtcatatctagcgctaatcctttaaaaagaacattatcactataaataaccccgttttcagctaaagaaacggtataaatatggaaaaatttctcatattgcgctttggccgcatcgataaatattgcgtcaaatggaccgtgagccaaaatttcttcagctccttcaatagcatctgttaataaaactttcactctgtcactagctccgtagcgctgaatgttatgtattgcttgctcatatcgttcttcgtcgcgctcaaccgtgataatctctgcatcagggagtttatctgccatttttaaagcagagtaaccaatggccgtcccaagctccaatatacgctttggtttttggatatctaaaatctgtaataagcagtacaaagaatctggttccataatcggtacttcattttccttcgcataggcctctaattctttaaaaaaaggactgctcttaggaatattttttaataaataatcatgaataatatcattcactgctagtgatctcctatcttaacaaacaaagcacctgccaaaaacatgctaaacatgcttctgacaagtggttgttttaattatttttcgtaatatgctcttcttttagtttattgtgctcttctaatgttttagagaagtatactttaccagtttttgtgtttgctaagaagtataggtaatcacttttttctgggtaaagtgctgcttccatcgaagagtctccactatttgaaattggacctggtggtaatccattgtttttgtatgtgttgtacggtgaatcgacttctaaatctttgtaagtcgttttgcttttgtgttcaccaagcgcataaagaacagttggatctgtctgcaagcgcatatcttttgctaaacgattataaaagacactagcaatcattttgcgatctacattttcagttgcttctttttcgataatggaagacatagttaagaatttgtgtacggacattttttgtttcgtaagttcatctcggtacttggcaatgttcacatctgtcgctttgaccatctctgtaataatttgttctgcagatacatccgttcctttaaaagtgtacgtagctgggtataaatatccttctaatggatgtttaatagatttgtttaacacatcattagttaccgtttctggatatgctttaatcatagaagcaacaaattcgggatcatccattgttttaagtacatctgctttttttagttttggttgataagcaacaattctatcagcaatttggtctaacgtgtagccttctggaatgactagtttggcaggtgccaccgtttttccttcttgcatttttttaacgatttgatccgtgttcattgcggggcttaattcataatttcccgcttttaaatttgtatcattattatattttacataaaacgagaaaatagaagcattattaattacttttttatcttctaaaatggtagaaatgtctgagatactagagcctgctgggatttcaacggtgattttctctttgcttgcttcatcttttggttctagttgcgattttacataataataacctgaaaaagttgcaatcactaaaattaaaataataatagaaataataattgtaatcttcttaccttttgtattcttcattttagacctcatttcattgaaaacaattctaatctattataccgattatcataaaaaaatgctattcaatacggaaaattttcttaaaaagtgacgtttttatgttttttcggtataataaatagcgtgatttaacgaacaagacagaatcagtcaaagacttgcttctgccaattaattaaatattgaaggagtcttttggatgttacatacgttaatacaaagtttgcaagatttcacgatgtggttagtagattcacttggtcactggggaattttcctcggaatgctgattgaaagtgtttgtattccgctacctagtgaagtcattatgctatttggtggatttatggcggaagctgggaaattaaatttttggctcgttgtctttgctgggatttctggtaacttagtaggttcactgattgcttattacataggtaaattcggcggtagagctttagtcctgaaatttgggaagtatattttcttaaatgtaaaacacctagataaagcagaactttggttcggtcgttacggagcaagagctgtatttttcggccgggtattaccagttattcggacatttatttcattacccgccggcattgcgaaaatgaatgtgtggaaatttattatatacacgattttaggttgtattccgtggaacatttttcttacatggcttggttattccttaggttctaattggagcgtcgtggaaaaatatacgcgaccaataagctatttaatgttagctttagttattgccatcgttgtctaccttgcttacaaagtatggaataaacgtgctagaaacgcaaaataaaaagcatgtcttgacagtttttgtcaggacatgcttttttaatattattcttcgtcttcgtcagctaggaatgtagcaaggatttcttcaatcatatcccattcttcatctgtttcaacaggtttaagttgaccttgtttaccttcttcatcttggatatagctagatgcaaggatttcgatttcttcgtcttcccctttacctgctgggaaatataatacgtaagatttgtcaaagtcttcggaatcaaagtcaaaaagaatttcgtaagcttcttcttttccttcttcgtttgtaatccaaataatattttcttcttcatgattatggttatgttcttctgccattaaattcacctcaaattaattagtagtgtccaaataggactgtaaaatcattactgcagctaacttatcaattacttcttttcgttttttacgcgaaacatctgcttcaatcaaagttctttcagcggcagaagtggtcaaacgttcatcccaaagcacaacaggcaaaccgattctcgcctcaagtacttcagcatatattttagaactttcagcacgaggtcctatggtgttattcatattcttaggaagcccaactacgactttttccacttcatattcaagcactagctcttttacgcggtcatagccgaattgctttctattctcgtcaatctgaattgtttccacaccttgcgcggtccaaccaagtggatcacttatcgctacgccgactgttttcgagccgacatctaaacccattattctcatttctcaccaatttcgttatttttcagatacgctttgacaagttcctcgataatttcatctcgttctaaacgacgtatcatacttctagcatccttgtgacgaggaatataagcaggatcgcctgaaagtaaatagccaacgatttgatttacgggattatagcctttttcttcaagagcaacgtagacttgtttcattaatttttttacatcttcttcaattgaatcatcgccgaagttgtaaaacattgtttgatcttttgaatccataatcgaagcacctcattccttcatgtatctcctttcattttacactatgtgaacggaaataacaaagaaaaatgaggtgctttgatgaaatttatgcttgttgttcttttacccatgtggaaacgtaatcaagagcagttcctagttctgctggatttttaccgccagcttgagccatgtcagggcgtccaccaccgttaccgccgcatcgtgttgccacttcttttaataatttacctgcgtggtaacctgctttgattgcttcttcagagactgcggagattaagtttactttatcgccttgaacagcgcctaaaacaagaattccaccaatttttttatctttccagttatccacaaattgacgtaattggttcatgtcttttgcattcacttgttttgcaatcactttgacgccaccgatttcttctggtgattcaaaaatatcagcgcttgctgcacttgccaatttgcttaataatgattcgttctcacgtttcacttcgcgcaagtcagcttgtaatagttctactttttgtggagtttctttagttgttgtttttagtagacttgctgcctgttttaatgtattttcttgttctgttacaaagcgatatgcttcttttccagtaacagcttcgatacgtctagttcctgctccgatacctgtttcggatacaattttgaatagaccaatatcagctgtattacgaacatggacaccaccacatagttcaatgctgtatttgcctacttgtacaactcgtacaatatcaccgtatttttcgccgaatagtgccatagcgccaagttcttttgcttccgctataggcatttcttcaattacaacattgatttgttcccagattttttcattcacgatttcttccatttttgttagttcttcttctgtaatttgaccaaaatgagagaagtcaaagcgcaaacgatccggggaaacaagagagccagcttggttaacatgttcgcctaatgtatcttttaatgcacggtgtaaaaggtgtgttgctgtatggtttttgattgtttcgcgacgttttaccttatcgacagcaagtttcactgtgtcgcctgtttttaatacgccttctttgacagaaatacgatgtaaattttgtttgtttggcgctttttgtacatcttctacataagcaagacccgtttcgctctcgattgttcctttgtcagcaacttgtccgccgctttctgcataaaatggtgtttctttgaatataacttgcgcttcgtttccagcggctacctcgtcaacaagggtgtcattttggattaaatacaagatttctgaaacgtgctctgttgagttgtagccaacaaatgcacttttttcggttaaattagcaagcagttcgccttgcacttgcatagatttcacatcagcacgagcagcacgagcacgagcacgttgttctttcatttctgcttcgaagccagcgtgatccacttttaagccatgatcttccgcatattcttccgtcaattccactgggaaaccgaatgtatcatataatttgaaaatgtctgcgcctttgataacttgttcgttcgtttctttcgcagtttttaggattgtttccaaaattgctagaccttcgtttaatgtttcgtggaaacgttcttcttccgtgcgaataactttttggataaagtctgtttggttttctacttctggatagaaactattcatgattttcccaactactggtactaatttgtacataaatggttcgttgattgttagaacttttgcataacgaacagcacggcgaagtaaacgacgtaaaatatatccgcgtccttcgttggatggtaaagcaccgtcaccgattgcaaaagctacagtacgaatatggtcagcgattactttaaatgccacatcattttcttgtgaatggccatatttcacaccagcgatttgttcaacttcacgaataattggcataaacaaatctgtttcaaagttagttggtgcgtcttggatgatggaaaccatccgttcaagccccatccctgtatcaatgttttgttttggaagcggtgtgtatgttccatctggattatggttaaactgggaaaatactaagttccagatttctaaataacgctcattttctccgcctggatataattctggatcacttgcatcatcaccaaaagcaggtccacggtcatagaaaatttcgctgtctgggccacttggtccaataccgatatcccagaaattatcttcaatttcgacgatatgatcatcacttaaaccaattttttcgcgccataacgttttcgcttcttcatcttctggatacacagtcacatacaatttatctggatcaaagccaatccatttagggcttgttaagaattcccaagcaaaaacaattgctccttctttaaaataatcaccgatagaaaagtttcctagcatttcaaagaatgtatgatgacgcgctgttttaccgacgttttcaatgtcatttgtacggatggatttttgagcgttcgccattcttggattatccggaataacggaaccgtcaaagtattttttcatggttgctacaccactgttaatccaaagaattgttggatcattatttggtacaagtggtgcactaggttcgatagtatgccctttttctttaaagaaatctaaaaataactgtcttacttcagcgcttgataattgtttcattttttatttcctccttttggttttacaacaaaaaaagcccatatgattgctcacagggacgattttggtgaaatcgcggtaccaccctgtttgcaatgatatagactttgtatcattacctcttcagttatctgttaacgtggataagacggatcatctaatgggagagcaattttggaactagcgtggttttccttccagccatgggaaaactctctaatcacgtggaaaccaaaatcatattcctatcatgtatcaatttctattcaacaataaactaaattataaagaacggatggctaaatgtcaactgtttattagactattcattgattgtttcttttcaacaaagcttccatttttaagtgttagttttacatctgatacttttgcaatctcaggatcatgtgtcaccataataacgcatttaccttctttgtgagctaaatcttggaataaggtaactacttctttactagtacgttcatccaaattcccagtcggctcatcagctacaatcaattctgtttcgcagcaaagggctcgagcaatcgaaacccgttgttgttgtccaccacttaacgtcaatactttttgccgcgccatttcttctgtgatgcccactttttctagcatactcagtgcaaaggcctttttatctggttgatttacatgggtaatttccattgcagtcgttacattttgaagagcggtcatataggttaacaaattatagctttggaaaacaatcgagacatatttatttctaaattgttgtaggccaatgcttttaagtgaactacctttataatagatatcaccctctttttgcgtatcgagccctcctgcaagggataaaaaggttgttttccctgagccggaacttccgactaccgtgtaaaaaacaccagcttcaaaatcataattgatatcatttaaaatcgattcgtctttcgttttataccaataagaaatattttcaaacgttaatactttggtcatatcgtcacctactcctgtttagttagaattgtttttggattcatacgaagaacgagtgcagctggtaaaagaacagagataaaggcaattccgatcccaattccgcccattttcagcatatcttctaatgttacttgaatatctagctctttgatttgttcggtgtttttcgtcaagttgctcacgctctgaccaaatccacccggaccgccttggccgccaccaccaccaggaccacggttttctgtggaagtcgttgtttcgttagtagatgaattttgttgtgccagtaattgatttccagctaattgcgctacataatgactacttgcagcagctaacccaaaggagactagagctacaattaaaatttcaacaaagaattgcgcgattaatttaccacgtttttcaccgatagctagaagtacgcccatttcgtatttgcgatcgcgtacttgcatcattacaagtaaacctaagatgagcgctccggcaatgctgacaatatagacaacatttttagagaaagatgcgacactgttaattggtccaatcatttgttggtaaagtgtatcattggcatctaatttaaatgtatcccaatcaatgctatcaacttttttcgcttctttttcaaaagcagaaatattagccgcatcatccattgtataaacagctgagtctaccgtgtttttatagtcggaacccttaattgtattagctactgtataaggaacatatactttattataaggatttaggaaagagaagttttgtgccatatcacttccagaatctgttgttttataaataccaacgatttttaatgttactttggtattgccatcactagatgtgacagtgaaagaatcgccaactttccaatcattttcttctgctaaattttcttctaccatagctacatttttatctttgtcagcggaagtaattgccacaccacttgttaattcactagttcctgcttcaaaatcagtgctagttgcagaatcaagtaatccactaatacttaaatcagcatctaccatttgcggtccaccttggccgcctcctggtccttgtgtttcggctgtagtggatgattcatcatttgaagatgatgtatcaccggaagactcgattggatcaaatccggatgctaaagcttgtgtactggaataataattgtaacttgctacatgatttaattttgccaaatcattagcatcactgacatctatcggactactttgaaattgcggcttggattcagttgagctactatcactacttgaagcctcttctcgcattgtctgcatttgtttttctcggtcaacagttagcgtcactgtaccaccaagttgttctcgcgccaactcactcgctttatctgcagccgattgaatggtaaaacctgataaaataagtacacagacgactgtgaatataattagttgtaaaacagatcttccttttctcgctttcatgctgagccatgctctcttaaaaaaattcatgtgatttcctccattcggtttctactccactaagattactggggagttatgaagaaagtatgaacaaactatgatgcatattttaaactttcgcgaaaaaaataatttggcttgattattaggtctaattaggctagttttaatgtaagaggagtgagaacagaatatgaaattacttatgatagaagataatgtaagtgtctgtgaaatgatagaaatgttctttatgaaagaagaaattgatgctacatttgttcatgatggcaaaatgggttatgaagcgttttttaaagatgattatgatattgcgattattgacctaatgcttcctaatatggacggaatgaccatttgccgtaaaatccgtgaagtaagcgatgtgccaattatcattttaacggctaaagagtcagaatccgatcaagtgcttggtctcgaaatgggcgcagatgactatgtaacaaaaccatttagcccacttactttaatggctcgaattaaagctgttacacgccgcaaaaatagtgccacttctacagaaaataatgaagatatcctagaaacaacttattttaaaattagtaaacgcacacgcgaaattttttatcaagatgagctacttgatgctctaacacctaaagaattcgatttactatattttttgatgcaacatccacgacaagtgttttcaagagaacaattgctggaacaagtttggggttatcagttctacggagatgagcgcacagtggacgttcacatcaaacgtttacgccaaaaaatcgccaccgaaacaaagccatttttgcacaccgtctggggtgttggctacaaatttgatgaaacggaatgaagcaaatgaaatttaaatatgcttaccaattatttttcacacaatttatcattttgctcattgcttgtattatgattggggtgcttgtctcccactcattaaaagattatttttaccaaagccaagtagatgacttaacaagttatgggcaaacgatttccagggatattcgttattcgccacaagatgcaacgatgcaagttttgaacacgtatcagcgaattttagatgttaaaaaaattcattatacaatcaagaatgccaacgacgaaaccatttatccaacacagatgaatcagcctttacctaaggatttctctatttctgcggatgataagaaaaagcttgaaagtggtgaaacggttagtaagaaaatagataatcgctttaacaaagaaatgacaattgtgtacgtcccaataatgaatggcgataaatttgtcggttctatcgtgctgaattcacccattagcggtacggagcaagtaattggcacgattaaccgctatatgttctacactattttactttctataacggtagcacttattcttagcgcaatcttgtccaaactacaagtaaatcgaatcaacaaactacgagcagcgacaaaagacgttattcaaggcaattacaacgctcgcttgaaggaaaataattttgatgaaattggtgcactcgccattgatttcaataaaatgacacaaacccttgaaacatctcaagaagaaattgaacgacaagagaaacggagacgccagtttattgctgatgtttctcatgaaatgcgtaccccgctcacaacgattagtggcctcacggaaggtttagtaaatgatattatcccaaaaagtgaaaccgatcgttgcatagcactcattgatacagaagctagacgtttaacgaaactagtcaatgaaaatttagattatgaaaaaatacgcagtaacaaaatcaagcttcaaaaaacacgttttaacggtaaggaattccttgagttaatcaaagaacaactcgattatgtagcaagcgaaaaaggtaacactattactgttgctattgataaagacatggcgatttacgcagattacgatcgtttaacacaagtatttatcaatatcgtcaaaaacagtgtccaatttactgaaaatggtcagattactctaactggcacacaagattataaagaatctgttttaacgataacagatactgggattggtatgaatactgaggaattagaacaaatttgggaaaggttttataaagcagatatgtctcgaacaaatacagcttttggcgaatctggtattggcttatccattgtgaagcagttaattgaatatcacgatggatcaattacggtgactagtgaaccaaataaaggtacttcatttactattcgccttccttttttccaagataacgaacaataaaaaaagaaccactttctaaacttttagagagtggttcttttttatcctaccataaactgttctggagtaatcccttccattccaatcatcggatcaatttccgtaatgttttcagcagtgagaattcgtttattcgtcatttgttctaataaaacatcttcgctcattaaacgttcagagagtgttgtattacgcttattttcatcaattcgttctatccccattcgaaaagcttcttcttccccgcaaagaatgagaaattgtttactccgcgttactccagtgtagagtaaatcgcgacgcaacatccggtagtaactgcggacaatcggcataatcacaatcggaaattcacttccctgcgctttatgaatcgaacaacaataagcatgggtcaattgattaaattcttgcctatagtaagaaacctctgtttggtcaaattgaacgacaatcagatcttgtttttcggtattttctttggcgtagattatagaaacaatttcaccgatatcaccgttaaacacatttttctctggttgattaatcaattgcagtactttgtcatgcacgcgatactttatgtcaccgaattgaacttctttacgacgccctgtatcatttggattgaagatttcttgtagttttttatttaaaatatcaatgcctgcgggaccacgatacattggtgctaaaacttggatatcttttgctcgaaaccctttgttttttgcattttttaccacttgttcgaccacatcaccaatttgatttaccgtgcaatgaaaaaaggagcgatcggcgctatttttggtgaaatcagctggcaacatgccttcttttatataatgcgccatttcgataatggaagaaccatccttttggcgataaatatctgaaagagctacagttggaatttgttcagattgcagaatatctttgagtacttgacccggtccgactgaaggcaactgatcttggtcgccaacgagtaccacttgcatgtgcgctggtaaagcacggaataattgattagcaagccaaatatcaaccatcgacatctcatccacaatcaacagtcgtccatcaatcagtctttctgcatcatcatccatttgttcttgaccattcattccgagtagacggtgaatagtcatcgcaggaagtccagttgactctgacatccgtttagcggcacgaccagttggagcagcaagaagaacggggaaagtcgctccatctttgtaagcatggggatcaagactcacaccatttagttccgcatacagctccactatccctttaatgaccgttgttttccctgttccaggaccaccagtaagtacgagcatcggagacattaaagcttgttctaaagcctgtcgttgtgagtctccgtaatgaacgccaatcctttcttctaattctcctagagctagtaaaaattcggattgtggaaattgttcttggtattctgtttgtttaagcattcgcttcacatgatatgcaaagccactctctgaataatagagcgatggcatgtatacgcgtgtgttttccgtaataatcttttgttcctcggccaatttttctacttgagctactaaaatactttggtcaattcgaatgccttcactttcttctagcaaatatgtcacttctccaagcagaacctcttgctccatgtatacgtgaccttgttgcatacaaaccgaatctaacataaataaaatccctgcgcgaagccgttctggatgattcccgccaagaccgagtttccgtccaagctcatcggcacgctgaaaaccaatcccttttacgtcctcaatcaatttataaggattattctctaacacttcaatagcattttgtttataggcctggaaaattttcatggataattgcgggccaaagccatattcgtttaaaccgaccatcacatgctctaatccctgattttctctaagggaagcaagcaaactttccgctgcaccggatggcaacttaggtaccgtgtttaacaaactcggatcggataaaattttcgtaatagcatcatcgccaatcgtatccacaatattttcagcggttactttaccaattcctttaaaaagttctccagaaagataattaattaaaccagcgcgtgattgtggcatttctttacgaaaccggtctgctttgaattgttgaccaaatttagcatgttcctgcatttttccgtagaaagtgtagacttcttgttcgtggagtgctgggaaaaagccagttacgataatatctttttcgtcccaatccgcatttgtttcttttaccaatattcgtacgacagaaaagaggttttcggcattgtaaaaaatggtagacaacatcgtgcccttcatgaaaagttcttccgttgtatcatcaaataaggcgagtgattcttgttcagccattctaagccgcctcctttctaattagatttactctgcttcgttttctaaatcttgaatcgcatttaaggcattttcagccaattcatgtgatgcgcctgtagcaattgctcgttcaaaatagtttttagcaagaacgatatctccttgccatgccagataagctgcaccaatattgtaaagtgcatctggatcttcaggcttaacaagtaaaacgcgttctaacatattaatcgcatcttcataaaaaccactgcgagcaagcacaatcccatattgaaataacgcttcgccgtcttctggatttaattcgacacttctaagtaaatatggcatcgcaagtgttagctcctccatttgaacaaaactcattcctaacatgaaaaacaaatcaccattttccattccttgttttgtggcattttggaagctatctgcggcttcttgataacgctctaattcataatataaatttcctaagctatagtaagcagctggaactgtgtcgtctagctcaagagctcttttgaaaaataattccgcacgttcaaaatcatccattgaaagtaaaacattcccaaaattaatataaccaactggatcgcttggatgttcttcaattacttctgtaaataatttgaccgcttcttctaaattaccttcttgcatttgtttaatacctaattggtttttatccatgttatccctcttatctttcctgattttttacagacgtattaagccacgtaacgagcgcgttcgctacttgatatgtttgttctggcccactaatcgctgcttttccgtccccatgttgttctccatatgaaccgaattgtgcatgatttccacctttaatagaaacaaaagtagtatctttaggcaagtattttttatttttattataagaatcttggtttaagacatcatcatttgtcgctgtgatagaaagtgctggaaaagaagcattttttaaggaaccttttttatctgggtaactagctaagaaaaacgcgccttctatttcgttttcgttatcatgtgcaaatctagaagacatcacgccaccaagcgagtgtccaccaatgacaaatttttcatccggagcttcatcaataatatcagcagctcgatttttaccaaatacagctaaattaaggggcatttcaacgatgtacgttttgtaaccgctcgaagcaagtttgtttgcaagaggtgcataacttaaagcatcaacaaaagcacctggatataaaataacactcatatctgcatccgatttacgtggagtaaaaacaaggatgtcattttcttcaagcacatccacagctttagttgaatttgcagcattttctgcggttatagacggttctgagttgaaataaaaatatccccaaataagaagacaaaataaaacaatcgcactcccaaaaatcgctatttttttcataaaggacctcttttcactgtttcgtataatattttaccataaaatctgtttaaaaaaacgcatttaaacaggaaaaaaccggagtctcgtagaaaacaagattctccggttctaatttcagcctacataatctaacttttgaccgtttttccaaaccgtatcgattgttccaccgccaaggcaaacgtcgccatcgtaaaatacaacagcttggcctggagtgattgcacgaactggatcagcaaaaacaacttctgctgtaccatcttcacgcaagtgcacggttactttagtgtccgtttgacgatagcggaatttagcagtacattcgattgtttttggtttttctgcattagttgtaaaagaaatgtccgttgcaattagagaatctgaatataaagtttcatgatggaaaccttgttccacaaacaatacattttcttttaaatctttaccaacaacaaaccaaggttcaccgtctccaccaatgcctaggccatgacgttgaccgattgtataatacattaatccgtcatgtttccctaacacttcgccgtccagtgttctcatttcgccaggttgcgccggaagatattcacttaaaaattgcttaaagtttctttcgccaataaaacaaatgccagtgctgtcttttttgtctgcagtagcaagtccagcttttttcgcgatttcacgcacttctgttttttccatagccccaagtgggaacatgacttttttcagttgatcttgtgaaagctggtttaagaaatacgtttggtctttattattatcaacgccacgaagcaattcgatttcgtcgcctacttttttcacttgtgcgtagtgacccgttgccacataatccgcgcccaggctttccgcatgttctaaaaatgccttgaatttaatttctttattacacataacatctgggtttggtgtgcgaccaagtttgtattcatctaagaaatacgtaaacactttatcccaatattctttttcgaaattaaccgcataataagggataccgatttggttggctacgcgaataacatcatcgtaatcttctgttgccgtacaaacgccaaattcgtccgtatcatcccaatttttcataaagatgccaataacatcataaccttgttcttttaatatatgagcagtgactgatgaatctactccgcctgacatgccgacaactacacgaatgtcactattatttgtactcaaagttcgctcctcgccttcttaaattttcattaaacgcgttactacttcactaattttcgtagccgccatttctacttcttctaaatgatttcctagtccaaaactaatccgaacggtctcttgaatcgctggatgattttcaccaaatagagcaactaaaacatgcgatggatctactgttcccgccgtgcaagccgagccactcgaaacagcaattccttccatatccaaattcattaataattgttcaattgaaacacctggaaaacgcacactaaaaacatgtggtagcgtatcagcttctaaaccatttacttcaaaatccagctctgcagaacgccaaatttctgccattcgttttttaaaggatatatattcctcgttttttagttcgcgttcatttgtcattatagaagaagctgcactaaatccgcagattcccgctaagttttctgttccagcgcgacgttttcgttcttgttcgccgccgtgcatttggtaagcaagacgtgtcccatttttgacgtataaaaagcctacgccacgtggtccatttattttatgagaagaagtagttaataaatctactcctaactccattacatttatatttaatagcccgtaagcttgtactgcatctgtatggaaaatggcttgttgatcccgtagcaatgcaccaatctccgcaattggctgaatggagccaatttcattgttaccatacataatagaaacaagaattgtttcagggcgtaaagcagcctgtacgctctctacagacacgatcccatgctcatctactggcaaataagtcacttcaaaaccttgagtctcaagatattcacatgtttttaaaacagcatgatgctcaatctgcgaagtaataatgtgtgttccgttttctttatgtgctaaagctgtcccaataagtgccaagttatcaccttctgtaccaccgcttgtgaaaataatttctttttctgtagcgtgaatacttttagcgattgtgtggcgagcttcatccaatgcttttctcgcctctcgtccagcgtaatgaatactagaaggattgccgtacgtattagtaattgcgccaagcattgtttggataacttctggatgaattggacttgtcgcagcatggtctaagtaaattctgttttccattttttatcgcgtcctttttttagacgaattcctgttcgccgttaatcgtttcttattgtaacagcaatactcctgtaaagtaaagaggaataactcctatttacacgcaaaaaagaaaccccaatcgtaccgtttaggattcccttcctttgaacccgctctcaattaaagcaggtgggtgctctgtctaacggtttgcacttcctcgtgtgaaggcatgtgcgccgcgccggaactccaagctccctaggtataaaaaattgttcggttcaaaaatatcaggaactatatcgaatacattagggtttcttttctttatttagaataccataggaaagacgaaatttcaacgttagcgacttttcatttggcactttttttattcttattttgccttgttttcattaattttttggtatacgccagcgattgtttgctcgaatttcgaagtgaatttcggctcataatataatttatttttaaggcgatctggcaaatattgttggtcaacccaagcattatcataattatgcggatatttataatcaattgctcgtccaagtttttctgcaacagagtaatgtccatctcgtaaatgatctggcacttctccactttttccttggcgaatatctgctagtgccgcatcaatcgccataatagcagaattggatttaggcgaaaggcaaagctcgatgacagcattagcgagcggaattcgcgcttcaggaaacccgactttttctgcggtttggatggctgcgagtgtatgcgccccggcttgtggactcgcaagaccaatatcctcatatgccataacgagcattctccggctgatactgactaaatctcctgcttcaattaaacgtcccatataatggagcgctgcattcacatcgctaccacgaacagatttttgaaaagcacttaatacgtcataatgggcatcgccgtctttgtcatgagctaaacttttcttttgtaaacactcctctgccacatcgagtgtaatatgaatcacaccatcttcatttggttcagaagaaatgacagctaactctaaggcattcagcgcactacgcacatccccattactcgccgttgcaaaatgttttttcgcaacctcatctatttctacatcataattcccaagtccccgctctttatctgaaagcgcccggtccatagttatcataatatcttctatcgttaaaggttttaactcaaaaatttgtgtccggcttcgaatcgccggattaatcgcgatgtatggattacttgtcgttgcacctattaagataatcgcgccactttcaagtaatggtagtaaaaaatcttgttttgctttatccaaccgatgtacttcatctaaaagaagaataaccgtgccgctcatttttgcctcagctgctactacttccatatcttttttattattggtaactgcatttaatgtacggaatgcatattttgtacttccagcaatcgcacttgcgatcgaggtttttccaattccaggcggtccgtataatatcatagaagataattgttttgctttgaccatccgattaataattttatctttaccgactaaatgcgtttgtcccacgatttcatctaatgctttcgggcgcatccggtaagctaaaggttgaattgccatataaccgctccttcttatttgcttatttcccattataacataagaacacctgtgcgttcacgtacttgtttcctttgccttctttcattaattccgatataatagatgcggtataagtggttttgaaattactggaggttaaataaaaatgaagattacaacaaaaggtcgttatggcctaacaataacacttgaactcgcaaaaagaattggtgatggtcctatttcccttcgtagtatcgcccaagataaaaatttatcggaacattatttagagcaattaatcggaccccttcgtaatgcaggaattgttaaaagtattcgcggtgcccatggaggctatgttttaaatggtgatcctgaaaaaattactgcgggtgatatcatacgtacactagaagggcccatcgtacttgtggaaagtatggaagatgaagaagctgcccagcgagaactatggacacgaatgcgtaatgctgtccgtgacgtgttagatcaaacaacgcttgctgacttactaaaacattctactgactctgaattaacagatggatacatgttttatatttaatgaaaaaagcctatttacgaataggctttttatctaccattgaaacggaaattacaccatattatagtctgattattctgaaataaataccaaaagcaaacaattgaaaacgctatatgttagataatctaaccaaattgattgaattgataaaatattcttgcctttatttgaatatagtgtattataaacgcataaataatatattacatgttagtttatctaacaaaaaggagagttgagtatggaatcagtatttatgttcttttgtactttattggtttggttgatgacaccaggaatcgcattattttacggcggtatggttcgacgcaaaaatgtgttgagtactgcaatgtatagttttagttcgatggcaattatttctattctttgggtgattgttggttattcgttagctttcgcccctgggaacggctttataggtagttttgattggaccttccttcataatgtcggttttgcggcaaatgctacttactcagacgccattccacatgttctattcatgatgtttcaaatgacttttgctattttgactgtagctatcatttctggggcatttgcagaacggatgaatttctccgcttacttgattttcattatcttatggtcattacttgtttattcccctgtcgctcattgggtttggggtgatggcggttggttacgtaatcttggagcacttgattttgctggtggaaatgtggttcatattagttccggtgtaacaggattagtacttgcgattatgattggacgaagaaaagaagccgactctgcttctccgcacaatttaccacttgcgcttattggtgggattctagtttggtttggttggtatggttttaatgttggtagcgcccttacaattgataatgtggctatgacagcttttgttaatacgaatacggcagctgctgcaggtattatcggttggggtttggttgaatggttgacgaataaaaagccaactatgcttggaaccatttccggagcaattgctggtttagtatccattacccctgccgctggatttgttaccgttccaagttcacttatcattggtttcttcggcggagcactatgtttctgggctgtgttctggttgaaaggaaaagtaaaatatgatgatgcacttgatgcattcggtcttcacggaatcggaggtatttggggaggtattgcaactggactttttgctacaacaaaagtaaatgaagctggagcagatggattattttatgggaatgcttctctagtagtaaaacaattaattgcaatcggctcaacagtggcatatgtagctgtagtaacagctctaatcgtcgtaattatcaaactatttttaccaatccgtgtaaatgaagaacaagagtacaaaggacttgatttgacactgcacggcgaaaaagcatatcaagaataaaggaggcaacaatatgtctggattaacaaaaatcgaaattattactcgcccaaatcgctttcatttatttcaaaaagaacttgcaaaaatcggcgtgagcggcttaaccgtaacaaaagcacttggtactgggttagaaaaaggatttattgaactttatcggggtacaaaaaaagaaagcaatattcatgaacgaatgaaaatcgaaatcgttgtttccaccgttcccgttgaggatgtacttcgtgttgttaaagaaacgctacgtactggcgaacccggcgacggaaaagtttttatttacccacttgcagaagtcgttaaaatcagcactggcgaaaccggaatcgacgcattacaagataaaccatcaaaatgaatagttaaaatggtgaattaattaaaaatggggcctctattctaaaaaatcaatgagaaatggcgtttaccccttccgcttcttaacttttacacttataatgaaaaaggaagaacgtttagaacagataaggaggcgcgaaattccctatgcgtaaaatccccattttcaccgttctagtagccatcctgctttttggcggttattatctttatcaacacgcttcgtcaaaagtagacgttacctttaatttcgtggtggaccaaaaatcaaaaaacaataccatcactggcaaaattgacggcgctggaaacaaatcaattacactaccactttctgaagagagttgggatgcagtaaaaaaagggaatcgctacaatgtggaagccactttttataataaaaataaaatcagctccagtgaagcgaaagaattggacggcccattctggtccaatgattccaatcgagggttattagttaataaggtacacgttgaaaacattcaagaattaagtgatgatttttaaagcaaaaagaaggtgagcattagtgctcaccttcttttttagtttgtttctttttttactgtttcgagtttcaactctgctagctgagcttcactcacttcacctggtgcgtttgttagcggatccactgcactacctgttttagggaatgcaattgtgtcacgcaagttgtttcgaccagctaagatcataacgatacgatctaatcctagcgcgataccaccgtgaggcggtgtaccatattctaacgcatccattaggaagccaaattgttctttcgctgattcatccgtaaagccaagtgcacggaacatcgattcttgcacttcttttttataaatccgtaatgaaccgccgccgatttcatatccgtttaatacgatatcataagcttctgccatcactttagaagaatccgtttcaagaagcgggatatcttcttcttttggtaaagtgaatggatgatgcgcagatacataacgctctgcttcttcatcgtattcaaatagaggccaatcagtcacccataagaaagcaagttcttcttcattgattaagtttaagtctttaccaagtttattacgaagcgccccaagtgatgctgcaacgatatctgctttatcagctgcaaatagtaataagtcaccatcttctgcttgtagtgctactttaagttctgccgctttatcttcagggaaaaatttagcaattggaccttttagttcaccagcttctacttttaaccaagcaagaccttttgcaccgtagttagcaacaaaaacgccaagtgcgtctaaatctttacgcgaaaaattagctgcggctgcttttgcattgattgctttcacttcgccaccattttcgattgcggattggaagactttaaaatcaacatcttttacgacatcggatacattttgtaattctaaaccaaaacgaatatccggtttatcactgccaaaacgatccattgcttctttatatgtcatacgaggaaacggtttttcaatggtgatattttttgcttctttgacaacatctaccagcatatcttccgtaatcgcttggatttcttctttcgttaaaaagcttgtttctaaatcgatttgtgtaaactcaggttgacggtcaccgcgcaaatcctcatcgcggaagcaacgtacgatttggtaatatttatcgaacccagcagtcattagtaactgttttaaaatttgtggggactgtggcaatgcatagaagttaccaggataaacacgacttggcacaagataatcgcgtgcaccttctggcgtactttttgttaaataaggtgtttcgatatcaaagaatccaagcgcatctagtttattgcggaacgttcttgttactgtgtgacgcattttgaaaatattattcatttctgggcggcgtaagtctaaataacggtatttcaaacgcaattcatccgaaacattcactccatcttcaatataaaatggtggcgttttggaagtatttaaaatcgtaatttcttctgctaaaacttctactttaccagttgctaatttttcattgatagctttttcaccacgagcatgaactgttcctttaatagtaacaacaaattcatttcgaacactatcagcgatttcaagcgcttcttttgaaaattcaggattgaagaccacttgcacaattccctcacggtcacgcaaatcaataaaaattaaaccacctaagtcgcgtcttttttgcacccaaccatgaaggacaacactttgaccaatatgcgcttcgtttaattcaccgcagtaacttgtacgtttttccatttttatttctcccccttggtgtttgataatttttctagtatggttgtttcagacacagcttcttgctcgcccgtttccatatttttcaattgataattgcctgtttgtaattcttcttcaccaagaataatggtgtatacggcattttttctgttggcatcttttagttgtgctttaaatttacgttttaagtaatctttttctgcactaataccattttgtcttaatttatttacgagtgttacgccttttagttctgcttctggttgcgctgtaatcacataaacctctaatggttttttcgcaggtatttcgatgtccgctttttctagtgccagtaaaatacgttccacaccaataccaaagcccattcctggtgtatctgggccgccaaactctctcactaaaccgtgatatctcccaccaccacaaagcgttgttttcgcgccaaatccttcttctacgctcataatttcaaatgtcgtgtggttataataatctaaaccacgaaccatcgttgggtcaatttcaaacggaatctctagcgcatttaagtaatttttaacattttcaaaataggcaacagattcctcatttaaaaagtccaaaatagatggcgcagattgaatcagtggattgtcatgatcttttttacagtctaaaatccgcagtggatttttgtgtaaccgtacttggcattccgcgcaaaattcatcaatatgtggttcaaaatgcgcaacaagtgcttcccggtgttttagacgactttctttatcaccaagactattaatgaccaatttaatgtttgttaggccaatttttcgaaaaaactccattgccagtgaaattacttctacatcaatagaaggatcatcacttccaagtgcttcaattcccatttgagtaaactggcgttgtcttccgccttgtggacgttcatagcgaaacattggttcattatagtacattttgattggttggctcacttcaccgtataatttatgctcaacgaaagctcgaacaacagaagcagtcccctctggtctcagtgttaagcttcttccgcctttgtcttggaaagtgtacatttcttttgatacgatgtccgtagaatcgccaaccccacgctcaaataattccgtatgttcaaaaacaggcgtcctgatttcttcatattggtagttttcgcaaacatttttaaactctgtctctaaaaaatgccatttactaacctcttccggcaaaatatctcgcgtccctcttggtaattgcaaatccatcaccataacctcctttttttacttcaaaatataaagaaaaacccccgtcacttgttataaaaacaagggacgagagtctatttacacccgtggtaccaccctaattagaactactaatgagtcctcacttaagtcagttaacgcctgaatacgttcttgcttactgtttttcaacaagaaacctcgagagtgtcttttcagaaaatgtgactatctttatcctttcagccaaatgggataaattctctgtatagcatggattttcttacttttctctgtcgctagttttaaatatgaattattctaagattactaaaaacacactgaaaagtcaacattttgccagtttttttataaaaaaccactttctagttccatgaaagcgcattttatggtaacattttactgtcagataaaagtttatgagtatatgggtggtgttagctttaaatgaagaataaattcatttttatcaccgttgtctccattttattgattgcagcaggtatttttacaaccatagcaatggcgaacgcgaattccgttgtcgtcaaagcagaagtcttaaatgtccgtagcggtcctggtttagcatatgatgtaacgagccaagccagaaaaaatgaagtactccgggtagtcggtgaagaaaatcaatggtacaaagttcagttagataacggaaatagcggttgggttgcaagctggttagtagaaaacactgatgtcagcgcagcaagtaacagtgtcgctatcgtttcttctgacggcggtttgaatgtacgtgaaaaaccaagtacctcaagtaaatcacttggattgctaaataatggtgatcaagtaacagttactagccaacaaaacggctgggcgcaaatccaatataacggaacaagcgcatgggttagctccgattacttaactattcgtgaatctgttacaaaagtagatgaaagtgagctacaaacagtaaccattcgcgatgactccactaatattagaaataagccaagtcgtgatggtgccgtcatcgaaaaagcaaattctggccaagggttcgctattcagggagtacagggtgactggtataaaatacgaacgacaagcggcgaagaaggttatgtagctaactgggtagtcgatgtttccgacaaaggtcaaacatccagccctcgaagcaaaacaaccaaattatccgaagcaaccatcgttattgaccccggacatggtggcaatgatccaggtgctaaaggggcaaatggcacaattgaaaaagaaatgactttaaagacagccaaacaattaaaacaaaaattagaagctagaggcgctaaagtaatcttaacgagaaacagtgataaatatgtctctctaaaaggaagaacaaatatagctgccgaaaataatgcagatgtgtttattagtattcattttgatagcttagaagacgcaagcaaaggtgtaagcggtcaaacaacttattattatgataatagtgataaatcgcttgctgaaagtattaatactacgctcgggaaagatctccctactactaatcgtggtgcaagagtcggcgattattatgtagtcagagaaaattcacaaccagcagtcctcttagaacttggttatctaagttccgcaaaagatgaaaataatattaattcagcatcttacagaagccaaattgctgaatcagtaacagacggcctatctaattacttctctaattaaaaaaaacaatcattcagtttcctgaatgattgttttttatttacgcatttcctctgaatcgagcattattgttactggaccgtgattgacaattttcacatccatcatagcgccaaatactccagtttcaacaataaaacccgcttctgcaagtttttgattaaataaatcatacagtgcttctgctttttctccaggagcggattttgtaaagcttggacgtttccctctacttacatcagcgtataaagtgaactgagaaacgctaagaatcgcgccacctcgttcggctaaagaaatattcatcttctctgattcatcttcaaagattcgtaatcccacgattttttttgccatatagtccacggtttcgggggtatctgtatgagtgaatccaactaatagacaaagccctccagctatttcactaataacttcatcctccatacttacggacgcttcataacaccgttgtagtagtacacgcatcgcttctccactcctttagttcattaatcttctcactgtatatacgtctgggatttgttttattttatccactactcgttgtaaatgattaatattatgaatttgcagcgtgaccactaatgttgccatcttgttgttatcaaccttagcattgacaccattaatattagaagttagactgttaatcacttgcaaaatatcatttaatagtccgttgcgattataaccgtatatttcgatgtctacattatagtcatttttcgcttgtgaatcagcatcttcccagtccacttcgattagccgctctggttcgatagcttgaacatttgggcaatcttgacgatgaatagaaatcccgcgaccttttgtaatatacccaacgatatcatcaccaggtaccggattacaacatctggatagtcgaattaatagattacctaccccttgaacaactactcctgcattatgcttaatcttcagtttttcattgttagcatctgaattcgaaggtttattttctgattgtgttaataacttctctgtttctgcttctagttcacgttcttttcgaagtttttctgttaagcggttagctacttgtaaagctgtaataccattataaccaacagcagcaaacagatcatcttcatgcgaaaagtttagtttatctgctaatttgcgaaggttttcagctgccataatttttttcggctcaaatccaagttgtctaatttctttctcaactaaatctcggcctttttcgacattctcttcttttgcttgtcgtttgaaaaattgcttgattttgtttcgagcttgggaagtttgaactaatttaagccagtctcgacttgggccataagaatgtttggacgttaaaatgtcaataatatcgcccgtttttaatttataatctagggtaacaatttttccattaatttttgcaccgatagttttgtttccgatttcggtatggacgcggtaggcgaaatcaagcggtacagagccatttggtaactcgtacacgtcaccttttggagtgaaaacgtaaacaacatccgaaaataagtcgagtttcaagctttccataaactcttccgcattatccgattcattttgatattctaaaatttctcggaaccatgttaatttgttatcgaatgaagttttggaattgaccactttaccttctttgtatgcccagtgtgccgcaaccccgtattcagcgatttgatgcatttcgtgcgttctaatttgaacttcaagaggttctccttgaggccctataaccgtcgtgtgaatcgattgatacatattcgacttcggcatcgcaatataatctttaaagcgacctggcatcggtttccagcgcgtatgaataataccaagaacagcatagcaatccttgatactactaacgacaattcgaacagccagtaaatcataaatttcgttaaattgtttattttgttcactcattttccggtaaatcgaataaatatgtttcggtctcccagaaatatccgcttgaatattaagttcatctaaattttcatttacaccatcaatcacatcatgcaagtaacgttctcttgcatcccgcttttgcttcattaagtggacaatacggtaatattgttgtggatttaaatagcgaagtgctgtgtcttctagctcccatttcactcgcgatattcccaaacggtgcgcgagtggcgcaaaaatttctaatgtttcattagcaattctacgttgtttttccactggcaaatgttttaatgtccgcatattgtgcaaacggtccgccagtttgattaaaataacgcgaatatcctgcgccatcgcaatgaacattttccgatggttttcggcttgttgttcttcatgtgatttatatttaattttaccaagtttcgttactccgtctactagcatggcaacttcactgccaaaaacttcttctaaatccgctagtgtgactggtgtatcttccacgacatcatgtaaaaatccagatgcaacggtcgatggatccatttttaattcgactaaaatgccggcaacttgaattggatgaataatatacggctcacctgatttacgaaattgctctttatgagaatcgcgcgcaaattcatacgctttttttacaagcgctagatgttcctgattcatataatgagaagccatatcgatgacctgctcagctgtcagattttgttctttcgccatttacattcaccctcttatctccatgtcatatatacaacttaaaaacacccaaaaactgagtgttctaaaaaatattcttgtttaatattatagcatgagccgactttgtttagaaagcacttttccttgatttttcacattttctggcagttttcagctttttaatcaaaaaactacccctaaaataataggagtagtttattttttataatttcataaggattaaacggtcgtaaccatttaattttttgtgtccttctagctcttttagttcgattaagaacgcacacccagcaacaataccacctagttcttccactagtttaattgtcgcttcgattgttccaccagttgcgagtaaatcatctgtaattagcacgcgttgacccggtttgatggcatcgctatgcatagacaatttattagtaccatattctaaatcgtattccatttcgattgtttcacgaggaagttttcctggtttgcgaacaggtgcaaaaccaattcctagcgcataagcaactgggcagccgataataaagccacgtgcttccggcccaacaataatatcaatttttaattcttttgcgtattcaacaattttatctgtagcaaaacgatatgcttctccgtcattcataaggggcgtgatgtctttaaacacaattccttttttcggccaatcgttcacaatcgctacataatcttgtaaatctttaatttccattttctagttcctccgcattcgggtaaattgatgtttccatcattgatttcatccaactatgaagctcagtataattggagtacaacagtttttttcttgtagttatttcttctaccttttgttgataaacaagtgactcgtccagattacgtttttcaacaacttcattgataataatctgaccactatccattttagcaaattctaaatcaaaaaacacctttgacatgaaatctatttgctctttattccaaccaaatttttgcattagccgtggtgtgtacttttcgattggaaatggttggaattttttaatgagactatataattctgcaaaagctaaccggtctggtattgccgggatttgattaccttctgctgcatcaaaatggacaaaaatacgctctggttttgtttcgcgaacaatcgtttcaactaattcgatattcgttggcatatctgcgaaaacaagttcttctgtctggaaatctgccacaaaatcagctttttcattcaccaaaatatagttttgttctccaagcgtaccaatcgttctttcttcaaaacaaacgaaaactcttgattctgtttgttcttggagtatcctagcccactctgatttattacgtacatcaaagagttgccagtgcgaaatgtgaatatccatcattcgtagttgcggttttttcacattgttccattcattgatggacaattctccaaccacatccacggctgctgtcggagaaattttatctaccaaatctcctacgccaaatccaatagagtctaaagtggcatcatttttctctgtggcgagcattgtttttaaatgggttttatctgccccaattcttttcgttccttttaaatgcatgttttctaacaaaaaaatcggtttaggattatccatcccaaaaggcgctaatttttcaagttgagcaataaaggccaccgaaacatcagcaagcttaattttttcttctattttcaaggccgggcgaaaatcttcttctgaaagataactcgcttcttcttgtaatttagcttctaattcagttaggttttcggctggcaatgtaaggcctgcagccattggatgcccaccgaaggccatcattaaatcacgatgtttatcaagcgcttgatataaatgaaacgcgtccacacttcgaccagaccctttagcaattccagttacaggatcaatccccaacacaattgccggtcgagaatatgttccaactaatttagaagcaacaattccaaggattccggtattccacccctcaccgtaaacaacgagcacatttcctaaagtgtcttttgcctcaattgcctccatcgcgagctttgttgtatcaacaactatttgtttccgttccttattcgcatcatcgatttcttccgctaagaaaagtgcctcttctggatcttccgttaaaagtaaatcagccgctggatctgctgggcctaatcgaccaactgcattcagtcgtggtgccaaaccaaagccaatcgtttcttccgtagcctcttctaatttcaaactagcttttttagctagcacagccagtccaaggttggcggattcgcgtaattgacgcaatcccagttgaacaagtaagcgattttcatctgttaaagaaactaaatctgccacagtcccaactgcaactaaatcgagcagttcttttggctcttctccaagtaaagcgtgcgataatttgtaagcaacacccacacccgctagttcatcaaacggataagctgatttaggatgctttgggtggataacagccacagcttctggcataatctcacgcggttcatggtgatccgtaacaataacatctaaaccaatctctttggcatgagccattacttcaagcgccgcaataccattatcaaccgtaataattaaatctgttccttggtttttagccatatcaaaagcggcaatattcgggccataaccttccgtaaagcgattaggaatataaaaatcagcatcggctcctaaatgccgcaatgttttcattaaaactgcaatactagtaaccccatctgcatcataatctccataaactaaaatctgctcatttcgttctatcgcttgcttaattctagcaaccgcaagatccatctctgcgaataaaaacgggtcatagctttcatatttttctgggtggaaaaatttatcgaattgtccttgcgttgtaatttttcttttccaaagtagttttgcaagtggaagcgagatttttagctgttctgctaattgacttgctttatcttccgccgcttcctcgatattccataagtattttgaatgaatcacattaccccacctctcaaccttcctattatatcgaaaatcactagaaaaaccaagaggaatcttccaataaaaaaacgccaacatattttgtcagcgtcccattttttatttagttgtgtctaccgcattttctgtatcacgtttttctactttagatgaatgagttttcattgctttggcagctgctagttgacgttccaattctgctttttcggtggttaattgttttacttttttcttcattccacgagatttcgcgatatttaagaaaaagataatcaaacaaccgcaaagaacagagcctaaaataattaatattaatggccactctgcttgagcaaataaaaagtttacttcaactggatctacattaataactgcaaaaatcgcaataatgagtgctaaaataatccccgcaattacttgccactgtactttattttctttcatgttttctcctccttgcacgattatcttattctgtacccgtttctgtcctattaaaaacgaccgaatctctttttatgaaattcggccgttcgtttttatacgacaggttgtccgttattacgtggttttttctttttaactgtgctaattggtccttttttacgaagttgtcttgctttaaatacgtaccataattgcatcgccataaagatggaggagaatacactggaaaccagtccaacaagtaaggcgatggagaagttcagaatagactcactaccaaatagtacaagtgcaagtacggtgaaaataaccgttaaaatggtgttaatagaacgagtgaatgtttgtcgtaatgctttattaacagcatccgcaatttcttctttcgttttgaaacgttgcatcttcatactaatatctcgtatccggtcggcggtgactatcgtgtcattaatggaataaccgataaccgtcagcaccgcggcaatgaaggttaagtcaacctccagccttgttacactgaagaatatgaagatgataaatgcgtcgaatagtaaggaaagaatcgctgcaatacccatataaaattcaaaccggaccgcaatataaagtacaatcaacacagacgccacaccgagtgcccagaagccatttttggcaagttctttcccgacagttggtgaaacagtactaatgcttggttcgtgcttatatttgtcctcaaagtaatttttaaatttagctacgtcattttgcgataatgtacctttataagaaacaacggctgttttagaacctgatccttggaaaacaatatcatctgatggcatatcaatcgtatctaaatctttcttaatttgcgtttctgtcagtgtttgattagctgtcacttccgctcgtgtcccactggcaaagtcaatacctagatttagtctaaatatggatagaataacaataccgacaataacaattgcagcaaaaatagataagaacagacgatgatgttttacaaaatcaaatcggtcaaagtgtgtttttaagctaaagctattaatgccctcatgtaaattatggatatcttttcgtttaactgcaaagaatcctggtttattgttaagccaattacttttcactaataagcctaataagaatcttgatccccaaacggctgtcaagaagctaactaaaatactaatgattagtactgtagcaaaacctttgatggagcttgttccaaagtagaagagaaccgcagctacgataagtgtcgtcaaattaccatctaaaatcgcacggaatgcttctttaccgccgacttcaaaagcagctttcgtcgacctaccaaccttgatttcttcttttattcgctcgtaggttattacgttcgcgtcaacagccatacctatccccagaatcaaacctgcaatccctggcaaagtaagtgttgcgttaagtagactcagtattaatagtactaaataagtgtatgcaactaaagtgatagaagcaataacacctggtaaacggtaaacagccatcatgaaaataaagatagcaataaccccaataataccagctaaaatagtttcttgtaatgcatcttgaccaaattgagcgccaacagatgtagagtaaacctctttcattttcacaggaagtgccccagagtttagcaattcagctaaatcttttgcttcttccgttgtgaagcttccggaaatctctactttatctgtatctaatacgctacttacgtttggtgctgataagtaagccgggtctttcttttcgcgttctgttttgtacttttgtccttctttccaatctaaccaaataactaattgattgtcaggcgcttctgctagtattgtttttgttacactagcaaatttgtctgcgctttttagttttaatgtaacgattggattattgcttgaatcaaaagcttgtttagcaccgcctgcaaccaagtcactaccattcatcatcattttgtcatttgcatctctaaatgataattgggctgtggtcgatagcattttacgtgcttctgcttggtcagttactccagcaagttgaacacggatacggttatttccttcgatttgaatacttggttcagctacacctaatgaattaacacgcttatcgagtgaagttactgtatctgtcaacgtttgtttcgacacagtccctttgccgtcagctggtgacacttcatatagaacttcgaatcccccttgaagatccaagcctaagttgatgttttgcataaccatttttgcggtaccaaatacagcaccaaagataattgcaactactagaaagaaaataactatcttactcttttttaccatttctgtttcgttcctccctcatctaaaccataacaaatcccagtctaacaacaaatacttctattttatgtatggaacccaagcatttgctaacaggctgttaatcttccacatttggttgaagcatactatctgcttgagaaacatggttattagattcttgttcagctgttgtcataataaattgcattaattgtccaattttcatttgcatgacatcatttatacgttcatgcaaagcaggggttggtccattcttccacttttcctctgttaaaaatgcccaaatgtggcttgccttgatttctcggtaacctaaaatatgaaaatcttctacttttattgaaatcgctggcgctaaatcttcataccattccgaaaatctatccatatcaagtcttcccctttcttaaacaataagcatattcccattttatctaaaaaaagcttaaatgggaagtataagctctatttttatggttaaaaaataccatttcaccgtttaaagggaaatggcatttttatttcaagtattatttgttgtcttctacaacttcagtgtcatcagaagttgtttctgctacaactggattagaaactgcattacctttttcaagtacagttctgattgcgttacggtcaaaagttaatttgctgtttccacatttcaaaatgactgtgccatcttcaattgcttcaacaataccgtgaagtccaccaatagtaataattttatcaccttttgctaaactactttgcatattttgtacttctttttgacgtttttgttgaggtctaattaataagaagtaaaacaaaacgatcatcaagataattggtataaatgttacaataccgcccatattttccaactcctttcgatactttatatatatttagaaattttttgcatcaggacgattgaatccatattgctcaaaaaattcttccctaaaatcagcaagacgatcttccataatagcgccacgaacttgcttcattaagtttaacagaaaatgaagattatgataagttgtaagtcgaattccaaatgtttcttcacaacgaatcaagtgtcggatgtatgcacgcgagtaatttttacatgtataacaatcacaattttcatcaattggacggaaatcgtgtgtgaacttagcgtttttaataactaagcgaccactagatgtcatacaagtaccatttcgtgcaatacgtgtgggaagaacacagtcaaacatgtccactcctcgaatcacgccatcaatcaatgagtcaggcgaacctacacccattaaatagcgtggtttgttcgctggtaacagcggtgtcgtgtgttccaaaacgcggttcatgacatcttttggttcccctactgataagccgccgatggaataaccaggaaaatcaagcgaaacgagatctttcgcactttgcgcacgtaaatcttcgtaagctccaccttggacgataccgaacaaaccttggtcttctggtctaacgtgcgcttttaagccgcgttcagcccagcgagatgttctttctactgattttttcatatattcatgcgacgctggatatggtggacattcgtcaaaactcatcataatatccgaaccaagtgcattttgaatttgaatcgctttttctggtgataagaaaagtttgtccccgtttaaatggttccggaaatgaacgccttcttctttgatatcacgcattttactcaaactaaacacctgaaaaccacctgaatccgttaagattggttgatcccagttcataaatttatgtagtccgcccgcttctcgaataagttcttctccgggacgcaaccataaatgatacgtattgcttaaaataatacctgcacccatggcttttaattcttcgggtgacattgtttttaccgtcgcaagcgtgccaactggcataaacataggtgtatcaaatgtgccgtgcggtgtatggattttaccaagacgagcacctgtttgtttatctgttttaattagttcataacgaatggcggacatgtgttacctctttcttatttactctattcactagcataacgaaaattaccaatgaaaacaagcttttctattaattttttcgcaatttaatgaataaacattgcatcgccaaaactaaagaagcgatattgttcttctacagcatgattataggctgctaaaattttcgtgcggtctgataaagcagacacaagcataattaatgtcgatttcggtaaatggaaattcgttattagtgcatctactgcctgaaaagtatatcctggggaaatgaaaatctctgtccaacctgattcagccactagtttgccgtcatgacgactcgcaattgtttctaatgttcggatagaagtcgttccaactgcaacaacttttccgccttgtgctttgattttattaattcgctcagcagattcttcagttaaacgataaaattcagaatgcattttatgattggtagtatcttctacgtccactgggcggaatgttccgagccccacatgaagtgtcacgaaaataatttctacaccctttgcgctaatttgttccagtaaatcttcggtaaaatgaagacccgcagtcggcgcagcagctgaaccattttctttcgcataaacggtttgataacgatcttggtcagccagttgttctttaatgtatggaggaagtggcatttcgccaagttgctccaatacctcataaaaaatgccttcataagaaaattctaaaatccgaccaccatgctcaagctcttccaagcaagtcgcttttaaagcgccatcaccaaaagtaatggttgcaccttttcgaattcttttagcaggttttactaaagtttcccatgcattgccttctttttgtttcaaaaggagcacttcaatgtgtgcgccagtttcatctttaataccatgcagccttgctgggaggacgcgtgtatcatttaacactagtgcgtccccttcgtttaaatagctgataatatctgtgaaatgttggtcttttatgtcacctgactctttatcaagcaccattagtcggcttgaagtccggtctaatagtggggtttgtgcgattaattcttctggtaaatcaaaatcgaaatcttctactttcatgctttatacctctttttcataacttattcctaaatggttatacgccgtttcagttacgattcttcctcgtggcgttctttgtagaaaaccgatttgtagtaaatatggttcttgcatatcttcaatggtttctcgttcttctccaatacttgcagcgattgtatccagaccaactggaccgcctctaaacgattggataattgtatggagtaatttttggtcaatggtatctaatcctcttggatctacttgaagcaaagtaagcgcttctttcgctagcttttcggttaccgttccatttcctcgaacttgcgcaaaatcacgaacccgttttaataaacgattggcaatccgcggggttcctcttgagcgtctagctatttcacgcgcaccgagatcatcaatttttgtatctaaaatattggaagttctgaggacaatttcggtcaactgctcttctgtataaaattctaaatgatcaattacgccaaaacgatctctaaggggcgctgataaaagtccagctcgtgtcgtcgctcctatcaaagtaaatggtggtaaatctaaacgaaccgagcgcgcagttggacctgttccaatcacaatatccaaacaataatcttccattgccggatataaaatctcttcaatcgctctagataagcgatggatttcatcaataaataaaacatcccctggctcaaggcttgtcaaaatagtcgccaagtcgccagggcgttcaatagctggcccgctcgttgttttaatttggctgcccatttcagatgcaataaccattgcaagcgttgttttaccaagtcctggtggtccgtataaaagcacatgatcaagcgcttcatttcggagcgtggcagcttcaataaagacggttaaattattctttactttatcttgcccaatatattgtgaaaggttctgtggccgcaaactagtttcaaaagatacttcttctgcgtctactgtttcacttgaaataattcgttcatccatgccacaagctcctctctattttgtcattaattgtagcgctagcttgatatatgcgtcgcttgttaagtcagcttctttagccaattttggtattacttttttaagttctcgcgtgctataaccgagcgcttctaaagctaatacggcctcttctaattgcggggaaagtcccgcaaccatatcgttttctggggcaacataaacaatttcgctcgcaacaacatcagccagttttccttttaaatcaagaataatttggcgagctgtttttttaccgacactcggaaatttggttaaataaacatcgtcttcggattcaatcgctgaaattagtggaacgacatcgcctgaagcaataatggctagtgcgctttttggtccaatgcccgaaacactcaataattttttgaataaataacgttcttctgttgtttgaaaaccaaataaagaaatattatcctctctcacatgctgatacaaaaagacttgcgcttctgtaccttctagtcgttgaaaggaaaacgggttccctgtaattatttgatagccgatttgtcctgcctcaacaacaatatattcgggtgtaatcgtcgtaacggttccttttatgtaatcgtacaatttattcgtcctctcttcatttcacgtcatacattatatgatagcataaaatggaacatctgtactagtttttgttcataaaaggaaagctctcttagtttacataataatattattgacgccttaaatagaagctatactttttttaatgacagatactgaattcgcaaaagcttgttgttcttgttcatctaattttaaagagatgatttcctttacaccattttgacttaaaacagctggtactccgatggctagaccgctttctccgtattcgccatcaagtacacaagataccgtcaaagcgcgctggctaccactaaaaatatgacgacaaatctcaacaatcgtaccacctatgccatattctgtgcatcctttttggtgataaatttcaaaaccagtatcacgagcagtttcaccaatttgtttcaaatccagtgactcgcctaatttttccaaactatattcatttaccggtttaccataaatagatgaatgtgaccagactgggaactgagaatcgccatgttctccaaggataaaagcatcgatactttgagcagcaatatctagtttttccgcgagtaaacggcgtaaccttgttgtatcaagccatacccccgttccgagtacccgttctcttggtaaaccggacaatttccaaacctggtatgtgatgatgtcacacggattcgtcgcgattaagaaaataccattaaacccgcctttcatcatctctggcacaatgcctgaaacgattcgtgaagtacttctcaattcgtctaaacgagtttgtccttcttttaaaggtcctgcagttacagtgattacagcgatatctacatctgcgcaatcgctcgcgtcacgaactgtaatatccattttcccgggcataaatgcagcggcatcagccaagtctttccgatttccttctacgcgttctttatttaaatctacgagaattaactcttccacaaatttttgattaacaaatgcgtgtgctgcagctgttcctacattcccagctccaattatcattactttacgcggtttcatattttcttcctcctagtgattcatataaaacacccctattcaaattgtccgaaaaaggggtgtgttgacttaattaatctctgcgttcgtataaacttcttgcacgtcatcatcatcttctagtgcctctaacattttatcaaattgtgtttgattgttttctgctatttcattataaaccgttggaaacatggataattcagcagtagcaaaagtataccccgcttcttgcaaagcctctttcacttctgaaaaagtagccggatcagtaaaaatttcaaatacatcctcgcttacttccacgtcatccgcacccgcttcaatagcctccagcataaattcctcttcgtctacggttaaaccttcgcgtaaaataacaagataacctttacgatcaaacatatagctaacacttccggtttcaccaaggcttccaccattcttattaaatgctacacggacattggtacttgtgcgattcttattatccgtaagcgcgtggactaatacagcaattccaccaggcgcatacccttcatacgttacttcatcgtagttttcaccactcgtattaccagaagctttatcaatagcacgtttaatattatcatttggcatgttgactgcttttgctttatccataactaatcggagcgaagggtttaaactcggatcaggacctttttttgctgcaacaaaaatttctctcgctaatttttggaatactttggaacgcttggaatcttgtgcattttttctaccttgaatattattccattttgaatgtcctgacatatatttcactccttttagatttagtaaagcttttctcctacaaattctaacgcaaaaaatgaggattcgcaataaaaaagttaccgcaaaaaattgcgataactctttatttaattcgtttgtaagcggtgaacgtgataagtgccaagtttatttgccgttccacctaaaagtgtaatttcatcaagcgcattggtaactagcacttcttttccttctgaaagcacatcaatcaagaaaaagtactcccctaacgaggttttaagtggtcttgattcaattttacttaaatctatatcgcgccatgcaaatgttgacaagactttatgtagcgctcctggcatgttattaggcaaaataacagaaatagaagttttttcttcttcttttggtaataaaatcgaaacaggcttacgacttaaaacaaaaaatcttgtttgatttaattccaagtcttgcgcattttctttgacgatttcaagcccgtactcatttgctgccattcgtggtgcaatagctgccacaagttcagtcggattattgctaacccattttgcagcataggcagttgaaggtgtaacttcacgctccactccgtataattctgcctgaagaaatgtatggcactgggcaagcgcttgtgggtgagacattaccttttgcacagatttccaagcggatacatgcgcgggatgaaccattaaatgttgcgcaattggtagaacaatctctgctactacagggacacttgaaaaatgaaataagtagtccagcgtgatattgacgcttccttcaatcgtattttcaattggaacaacagccacatccacgtcttccttttcaattgccataatacaatccggaattgtactcttagctatcatctcttcttttggaaaagcctttgctgctgccgaatgggtaaaagatgctgctggacctaaataagcaattttcattttcaactctccttttttcatagctaggaaaaaagcgtgcgccaaatgattggcgcagcactttgtttaatccataaattcaaattcataatcaagcaagcgaacgatatcgccgtctttggcaccacgttttctaagcgcctcatcgacacccattgcacgaagctgacgagcaaaacggctaatagaagcatcacgctcgaagtttgtcatcgtaaataagcgttcgattttcgctccacttaacacaaaagtaccatctggttctctagaaatctcgaagtcaggttcctcagcaacatatttgtaaagaactgtatcttcgtcttcttgctccaaaatttcattaagtggaaattctggtgttgtttctaatttatcagcaatagcaagaagtaattcgcgtaggcctgtttttgttactgcagaaattgggaagacaggaatatcttcagcgattttagttttaaattcgtttaaattttcttccgcatctggcatatccattttattagctacaataatttgtggacgttccataaggcgcaagttatattgttctaattcgttattaatggccatatagtcttcatatggtacgcgtccttctgagcccgacatgtcgatgacgtgcacgataacacgtgttctttcgatatgacgtaagaattgatgacctaaaccaacaccttggctagccccttcaattaatcccggcaagtcagccataacaaagctacgaccatctccagcatcaaccattcctaagttaggaacaatcgttgtaaagtgatatgcggcaatttttggtctcgcagcagaaacaacagataataaggttgatttaccaacacttgggaaaccaactaaaccaacatctgctaatactttaagttctaattgtacatttcgttcttgtccaggctcaccgttttcagagagttctggagctggattggctggcgttgcaaaacgtttattcccacgtccgccacgtcctgcttttgcaataactgcacgttgaccatgtgctactaaatcagcaataatctcgccagtatcaatatcttttacaattgttccttgtggtactttgactactaaatcttctgcaccgcgtccatgcatacttttactcatgccatgttcgccgtgctctgctttaaagattcgtttaaagcggaaatccaccaatgtacgcagaccttcatctacaacaaatacaacgtctgctcctttaccaccgtcaccgccagcaggaccaccgtttggtacaaatttttcgcgacggaatgctaccataccgtccccaccattaccagcttttacatatatcttaacctgatctacaaacataatttttatattctcccgttccttaaaagtcttatctttcattataacgaacaaactatacatctgtcactatatttatttctatttccagatatttatttgttttacatagcaaaaatgcgtcaaatgcttttacacatttgacgcatcttttagaatttatttaaaagcttgtgccgctttaacagctttatgccagccttcatataaatcttctctttgttcttctttcatttctacttcaaaacgtttgtccagtttccaatgttttttaatttcatttttatctttccaaacacctactgcaagtcccgccaagaacgccgcacctagcacggttgtttctttgttttctggacgctctacaggaacgcctagaatatcagattggaattgcattaagaaattattagcagaagctccgccatcaacacgtaacgtttttaagctaattccggaatcttgttccattgcataaagtacgtctcttgtttgataggctagagattccaaagttgcacggataaattgttctttttccgtaccacgagttaagccaaatacagccccacgaacatctgaatcccagtaaggtgcgcctaaaccaacgaaagctggtacaacatatacaccgtcacttgattcaatacgacttgcatagttttcagagtcgcttgattgacgaaccattcgtaaaccgtcacgtaaccactgaatagcggaaccagcaacgaaaatactaccttcaagtgcatattctactttaccatcaattccccaagcaagtgttgttaataagccgttttcagaacgaactgctttttccccagtgttcattagcaagaagcaaccagtcccgtacgtatttttcgccattcctttttcgaaacaaccttgaccgaataatgcagcttgttggtcaccagcaatacctgcaaccggaacttcttcaccaaagaagtgataaggcactgtgtccgcatatacttcagaggatggacgaacttctggcagcattgctttcgggatattaagcatttttaaaagctcatcatcccactctaaatcataaatattataaagaagtgtacgagaagcattggaatagtcggtaatatgagcacgaccaccagttaatttccaaactaaccaagtatcaatagttccgaaaagaagttctcctttttcagcacgttcttgtgcaccatctacatggtcaagaatccagcgagcttttgtacccgcaaaatacggatcaattaaaagaccagttttagaacgaatggtatcttcatagccatctttacgtaattgtttacaaatatcttctgtttgacgagattgccaaacaatcgcattataaatcggatttccgctttctttatcccaaataacggttgtttcacgttggtttgtaataccaatcccagcaatttctttagaagaaatatttgtttttaacaatacacctgcaataacagctaaaatcgaagcccagatttcattagcattatgttctacccaacctggtttaggaaaaatttgatcaaattcttcttgtgcaacgccaattacttctccttcttcgtcaataatcatcgctcttgaactcgttgttccttgatccagtgctaaaatatatttcttttccatgtaaaattcctcctctagttttaagtacaacgaaagcccgaagaccttcgcttggagctagttataattctagcttatgctaaatcttttttcttgtcgagttgcatagttaaaataagaattaaaacaaataatactgcgaacacccagaaccacattcctagttcgccgttaataatggcattataccctaaagcacctaatgcaccgcccatgattggtccaataactggaacccatgagtagccccaatcagatccacctttgccagaaatcggccaaacaaaatgcgcaattcttggtccaaggtcacgagctgggttgatggcataacccgtagttccaccaagagacatcccgatagctacgattaatgcaccgactacaagtggatttaatccatctgaaaaggaatttgcacctagtgatagtaatccaaatactaatataaaagtacctaatgcttcaccaaaaaagttagatgtaaaatggcgaatagctggcgccgttgcaaaaacacctagttttgttggtttgtcttctgtttgtttccagtgtggatagtaatgcaaccaaattagcgtagccccgataaatgccccaataaactgagcaagaatatatggcaatacgtaattccacgggaaagcaccagcaagtgccataccgatagttactgcggggttaagatgggccatactcatataccctgagacatacacacccattgtaacacccagcccccaagctaaagtaataacgacccagccgccattctctgctttggatcttttcagtgaaacacctgctacgacaccagcacctaaaataattagtatagccgtaccaatgacttcacctagaaattgtgttgctaaacttgtgtcaatcatcttttccaactccttcttcttgcttatttgtagcaccggaattttaacacttactagtccccttacattccgattatcaattaacttcaaaaaaagaatgacaatcaaaacgtaggcacactagtacccttgcatcgtttcgattgtcatctcttctcctgacatgttaattaacttgagtctatttaatcatatcaagaaaacgctgtcaatcaaacgacttgtcctatttttcacaatgtatcttcatctgcctctttacttttaccccaattcgcgagagttataacccattttaaaagaaattaattcacaaagatgaaaacacaaaaaaaccgccacaagtgacggtttttaaaattgtatttaagcttcttgtacttcaggataaacgctaacttttttcttgtcgcgtcccatacgttcgaaacgtacaacgccatcagttttagcgaataaagtatcatcgcctccacgtcctacgttagttcctggatagattttagtaccacgttgacggtaaaggatagatccaccagtaacaaattgtccgtccgcacgttttgcacctaaacgttttgattcagagtcacgtccgttagaagtcgaaccgccaccctttttgtgcgcaaaatgttgaatatcaaattttaacatgaaattccacctcctatttggagttaatttttatatgatcaggatagctgtacgctaatgaccttagttgattttccatccccgtaagcaagatttgcaccacgtcatcccctacataatcagcaggcacagaatagtaaaggtaaccctccgactcttctattacaggatcaaaatcacgtacttccgaaatagcattcaccattccaaaagcaatagacgaagctcctgcacataccaaatcactgccatgttcggcaaaatcggcgtgtccactcattgtaaaagaaattatttggttatcttctcgcataacatcgacttgaatcattgttttcgtcctttcaaattaagcattgattgcatcaatagttaattttgtgtaaggttgacgatgaccttgttttttgtggtagttctttttcggtttatatttataaactgtcaatttcttcgcacggccttgtttttcaactttagctgttacagttgcgccttccacgaatggaacgccaactttagcggaatctccacctacgaatagaactttgtcaaaagtaacaacatctccaacttcacctgctaatttctcaacatagatctcttggcctgcttctactttgatttgtttcccacctgtttcaataattgcgtacatacttgcacctcctcatatactaagactcgccatcacaggggatttacacgaagtaaatacttgacccagctctgtgcggttgtagcttggtgcgctacaaacataacagtaaaatgatagcataagcaagtagcctatgtcaaccaattgttgattttagttctccactcgggcaatttgataaaacgggactctttcatccgccacttcccaatcaattggcgcattacttagcgtattcaaatctaaaaaagtctctaaaacatcttctgtcgtaataatttgaatgctgtttggctcattttgcataatgcctgaaagttctcgttctaattcgaaagcaagagtctctttggaagccacatgacccgtcgcataacaaactggacaaggcatcgtcgtcgtttctaaaaatgattgttgtttcttgcgtcttgtcaattgtagtaaccctgactgcgaaagtgctgcaacttgtgttgtaatgtattcttctcgagtttgactctctaacgccgcgtacagctctgtgtagcccgcttctgacattcctccaataaaatccactaatatcattccactcatattacgtaacctaatttgtcgaaggatttcaggaactgctttgagatttactgattctactgttttttcttttactgtggtacctttaaatttacctgagttcacatcaacaacccacatcgcctctgttttttcaataaataaagaagaaccattactcaaatgaaccactggccgtgccagtctatccatttgagctttaatacctaagtctgcaaataaatcagcgcttttttttaagatgatttgcttatctggatatatcatttctagcattttagcaaactcaaaatcatccgtaattacttccgatggtgcgtatcgttgaatgaactgtttcgtactatttaaaattcccgaagccgctgataatagtaagccaggttttttccttttgctagcttcttttactaatgtttgatatttatctctcgcttgaaccaaagcttgttgtaattgctctttcgttgcaaattctgcattagatcgaataattatcgcttcattttcttccaccatggtttccattattttctttaatgtgattttgtcttctattcttttagaaacagaaatatattcttttccatacaaataaataagcaaatcaccagaaaattccagtatgccagttaatagtgggagtttcgtcacgctaccttcccgcacgatttgaaccggaattttagcaccttgagttttatcatagctttccggaatatcttttaaatggatgaaacctttgttattattgcctaaatcaacaaaagccgcttccacttttcgatcgattttttgaataaatccataataaatatcaccaacttgaactttttcagaaggtcgtacaatttcgatatctattaacaaatcatcttccattgccactactcgtttttctataggagccgcgcttactattagctttttcatccaatcaccttttataaagacccttcatctcaaagataaagggtctaatttttattttccactaaaaagttgctttaagcgagcgaaaaatcccgctttttttgtttcaatcgacattaacgggatagattctccaagaatacgtcgagcaatattacgataaccttgtgaagcacggttgtttggcaacatagctactgggtccccgctattagaagaacgaataacttcatcatcatcaatgataattccaagcaattcaatcgataaatgcgtagtaatttcatcgatatccattacatcaccattcatcatcatttgcgtacgaattcgattaataattaattttggtggctcaatatcttctttttcaagtaggccaataattctatccgcgtcacgaactgctgatatttccggggttgtaaccacaatcgctttgtctgcaccagcaaccgcatttttataaccagtttcaattcctgcaggacaatcaattaaaataaaatcatagtctggacggagttgattaattaaatccaccatttgttcacccgaaacagcatttttatcagtagtttgcgccgctggaagcaagaaaagtaaatcatcaaaacgtttatctttaatcattgcttgatgaattttgcagcgaccttctactacatcaactaaatcataaataattcgattttcaagacctaaaacaacatctaaattgcgaaggccgatatccatatcaatcaagcacactttcttaccttgaagagcaagtgccgttcccaagttagcagttgaagtagtttttcctactccacctttcccagaagtaatgactatagcttctcccatgtttaacgccctccttgaaaattagaaatttcaggtctaatttttcttatcttatgtattccatcaattactatctcacctgcatcatttacaaatgcagaaaacaaatctgtttcagtgacctctttataatcttcactatcaaatccatataccttatcagcaattctaacttgtgacggataaagaaatttccctgctacaactgcattttcgttgccttcaaagccagcatgaataattcctttaatattacctagaacaaatacattgccatttgaacggatttgtcctccaggattaacatcgccgattagcaaaaaatcccctggaacctgaacaacttgtccagaacggataatcgttgccatagaaaaaatttgatcattttctttccattttttggcctcgtctttagacatcacattactataaaatgcactaatttccatttggctattctcatgaataatagttgatatttcaagttcttcttcctctgaaaacagacggttaccaatttgaacttgtacctctaatttttcaccagagtaagggttttgtttctgatctgcaagcaattgagttagttcttgttgcaactcagatatacttgctttatcactaagaaaaatactaatgccatcttttgtgcctttaatttgaacattcttcttcatataccatttcaccccgcaacatttatactctagcctttagtatacactaactcaaattaaatgataataaaaaaatactttttttgaaaaaacagcttgaaatcgcaagctgtggatattctccacagtcatactttttcaagtaatagcgacttcaaactgttaaaattacgatagttattctgatttaaccaaacgatcaagaaacaatcggaatgggaaaaagacaactaaaaagaatgctaaattaatcaaaatggttgtccataaacgctgatcaataaaaactgggatagacatggttgtcgtaccgattaaataataaaacgcatatactaaactttctgtaagaataatattaaatatcgcaattaacccaaccaaaagtatattattttgtaacactttcataaatttatctgtgatatacacagtaaacgggaagatagcaaaataaatgcccatcacgccagtataataaatatcaaacagcaagcctagaataaaagcatatgctaaagtcgtatttcgtttataaaaacaagtcataatcgtcaacataataagtaaaaaatgcggaataaaaagatgtctatcattaaaaagaccattcgcaaactgaagactaaaaacaccctctaaaataaaggttacaaccatgattgcaggaagtgcaatgtttttcttaacattcatgattattggcctccagtcgtgtctgaactagttgtatcgtcatccgtcgtccctgcttccgctgaacgcttcaacacagttacatggtttagatcatacatgtcagcacctggcttaataaacgcggtttgagataatcccattttatcagtttctactttttcaattgtaccgataaagatacctgctgggaatttcccaccgagtccagaagtaacaactttctgtccttttttaaatttcatgtcatacggtaattgttttaattctagcaacttagtatcactgtcataaccattgataatcccgaatgcattttccttgccctgcactttagcagaaacacggtttttaacatccgatgaagttaataattcaactgtggctgatttagcgcctgtcgttgttactttaccaataagaccacttggtgttgtaactgccatatcaggttttactccatcacttgaccctttgtcgatttctacttgatcattccaattagtaggatttctagaaatgacagaagcattaagtggatcgtagtcgcgaatactatcagtaatatcaagactttcttttaaatctttattttcttttttcaagtctgcaacttcactttcaagttgtgccaattcttctaaacgttcttttagatgttggttttcagtataagtgttttttaaatcaaccactccatcaactgcacctgagataaatgaagtaggcttagctactatattttcgccaaatccaacaacatctttcacaaattgttctggccacgaagcattctcacgatcacgtaaagaaaaaccaactagcgcgacgagaacaataatagatattaacaagataatcaaacgtttattgagaaaaaattgtggcataacgacacctcatctcgttagtactctttttccatttttttgaagctaattcatcttgttatatgacataaatgagtgtgtccatttagttcatttttttacgtttatacatatccatattttctaaagctttccctgttccaattgcaacacaatcaagtggttcatctgcaataataacaggcatttttgtttcttcagaaataactgtatctaaattacgtaaaagcgctcccccacctgtgagtacaatacctttatccataatatcagctgacaattctggtggcgtattttcaagtgttccttttacagcatcaataatagctgctactgtatcagcaagtgcttcgctaatttcttctggagtaatttcaatagttttaggaagtccggttactaaatcgcgtcctcgaatgctaaatggagataagtccaaaccttttggactagctgagccaatttccattttaattgcttcggcagtacgatcaccaattaatagattatattttttacgaatgtaattaatgataacttcatctaaatcatcaccggcagtcctcacagagcgactagttacaataccacctagagaaataacagcaacttctgtagttcctccaccaatatctacaaccatactacctgtaggctcgccaactggaagtccagcaccaatagccgcagcaaacggttcttcaattgtaaatgcgtctttagcacctgcttgacgagtcgcatcaataacagcgcgtttttctacacctgtaattccagaaggtacacatatcattacgcgtggtttacttgcattaacacttttaccagctttttgtatgtagtacttcatcattgctgctgttgtatcataatcagcaataacgccatctttcattggacgaattgcaacaatatttcctggtgttctaccaatcatatttttagcatcgctaccaactgcaactatttcttgtgtgtcttttttcattgccacaacggaaggttcacgaaggacaataccttttcccttcatatagacaagtgtgttcgctgtccctaaatcaattccaatatctttattaccaaatccaaacatctgtattctccttttccttcgtaatattctacaggatacattaagtttccttattcgtccattaaattaatgttaccttatccctttgtgtcaatgtttctgtatagacacataaacaaccatcttattataacataagtaagactatgagacattaatttttcatgagaaggaaaaatttttaacttttctttaaaaactatttttgagcattattaaatttactaagaatatacttttgaaaggataaattttcacttaaaaaattcaatcagacaaagaaaaacaggaatggcaaacatgccgattactagtgaaaagacaataatattatctttatatactctccatttattttgcacaataagccacctttacattttattggtactcactttagcataaggtagcaaacgttgtctgtagatattttgtgaacagtattctggatttaaaagtaacctttttctttcaaactaatatacttattcttgccaatgataatatgatctagtaaagtaattccgacaatattgccagcttcagctaatctttttgttacaagtaagtcttcactagaaggagtcgggtcgccagatggatggttatgaaagcacataattgacgctgctgattttctgagcgccaatctaaaaacttctctagggtgaacgatggaagcattcagaccaccaacaaaaatcgtttgccgatatattacttgatttttggtatttaaaaataggcaatggaaatgttcttgaaacagaaaagcaagctctggcattacaagttttactgcatcttcgggacacctaacaaccacttcttcctgctccgttacgatgctgatacgccttcctagttcaatcgcagccatgattttagaagcttttgctattccaataccattaactaattgaaattcttctatagaagcatattgcatttcacccacatttttgaacttcatgatgattcgattagctatcgtcaaaactgactcatttttagttcctgtttcaataattaaagcaaccagttccgaagatgaaagtgcttctataccataattctgaagtttttcgcgtggtttttcattctctgatatttcatgtgtcaacataagaacagctcctatttcatcaaaatactaatcagcaggaaggaaacaaaaatatacggaacaaatggaacttgcttatttttcttcactttttttaacatcaacgcagttaataatattattgtccccataataattgctagaaaaaagatataatatcctattttaaaacctaaaaaagtacttaaaataataagtattttgatatcgccaagtccaattccttttcgaaagataataaaaaaaagaagataaaaaagacagctgattccgcctgaataaatgagatccatcaaagattgattatataagatggcgatggttgcaagtacacaaaaaaatacaattaatattgagttagggacatacaaataaaaaatatctgtgataaagaaaaaagctaaaaaataataaataatgtagtaaagaagaaacgaatatgaaaaagaaaattgaatgtacaatagaagtatatagattggcgttactaattccattaaaaagtagattatcgggataggtctttcacagcatctagactttcctctaaaaaaaagaaaggaaaaaatggggatgatatgataaaaagcaagtttcttttgacaataattacactccgagaagcggaataaaaatgattttttcactggaaaacattctcctgcgacttgaatgaaagacataaataccgcactataaatagctaataaaaagtaaatcatctgtcacctcctagttgttaaaaacagaatagcagagacgaaatttttttgcacatagctaaaatcacttttccatcttctattgcataacaaaaacacctattttcattagtggaaaacaggtgtttttatatattttatcttctgaaaatccttttttagctatttgttcttttttatttctcacagtatactcgatttattcaaaagattaacgtattgaggccaacaaatatttccgcacttctgaaatgaaataaagcgatcccgtaataaagattttcgtattagtttccgtttcgtaaagattatttaatgcttgttgccaatctggattcaaagaaataccttcatttttccctatttgtattacttcttccgccatcatagctctaggataatcaaaagtagttagtattatttctgcatttggaattgactttaacatcgctaacatttcttgatagtttttatcagctaatatactcactattattttcttaggcccaggatacttttggacggaatgagcgaatgttttaattccttctggattatgcgctccatccaacataataaatggatttgaaatgattttctccattcgtcctggccaaaatgctttttccaagccctttctaattgccgccaaatcaatttcaaaggtagaaaatgtatttaagtactgtaatactttaatagctaccgctgcgttattcaattgatgcagaccaaacagtccaatggaaagattacttatttcttctccataaatggttttataggttatatttccattttcattatgcatggaaaaagccttattcaattgggtaacattagatttattctttgttgctatctcagctataacttcttgagcttctttttgtatagcacctgaaacaactggtatgcccggcttaattatgccagctttttcactagcaatttgctcgattgtatccccaaggaattccatgtgatccatcccaattgtggtaattacagaaactagtggaactagaatattcgtagagtccagtcttccgccaagtccaacttcgataataccaatatcgatggaaacataatccgcaaaacataaaaacatcatagcagtaataatttcaaattctgaaggtggtccataaacagttttttctagctcttctgcaataggtttaattcggttagctaatgaaacaatcatttcatcgctaattggttcaccattaacactaattcgttcattaaaaacttcaatgtatggtgaagtgaatgttcccgctttatatccagcttcttccagagcatttctaacaaaagtaagtgttgaaccttttccatttgttccagcaatatgtacccacttattcgctttttccggatgatttagcttttccatcatatactccatccgagctagtccaggctttattcctagacgaagcgttccatgaatccaatctaatgcttcttcatacgaatttaatgtcattatttaaaccaccttaaaactgaccctaccacttggtttcatgataaggtcagtccgttttttatacttcttttaacgtttcaattctttcaagaacagaggcttttttatctagataatctttttcttttagacgctcttctgcaactacactctcaggagctttgctaatgaatcgctcattgtttagtttcccttgaactcttgccacttctttattccatttttctagttctttttcaagtcgagcaatctctacatttaaatcaattaacgcttctaaaggaatgaaaatctctgctccagatactacagcagtcatcgccgttttagatgcttcaacatcgaaggaaattgtcacttgttcagggttacaaaaacgttcaatataagaaatattttgttctagaatttctttatacgtagtatctttcggcttaatttcaagaacaattggcttactaagaggcgtattcacttctgatcgaatattccggacagcacgaatcacttcaactaaagtagccatggccgtagaagatttagtatcaatctgttgttcattcacttttggccattcagcaattgtaatagattccccttcgtgaggtaaattttgccaaatttcttctgttacaaaaggcatgaatggatgaagtaatcgcatagtcgcattcaaagtatacgcaagtacagatctagttgtttgttttgcaacttcatcttctccgtaaagaggtattttcgcgatctctatataccaatcacagaaatcatcccaaataaagttatataacgttcttcccacttcaccaaattcatatttttcacctaaggaggtaaccgcttgaattgtttcattaagtctagtcaatatccatttatcactaacttcagtaacattagacaaatcaatttcattatatttcattccatctaaattcattaatacaaagcgggatgcattccaaatcttattaatgaaattccaagtagactctactttttcatagctgaatttcaaatcttgacctggagatgaacctgttgcaagtgtataacgaagagaatctgctccgtatttgtcaataacttcaattgggtccacaccattaccaagtgacttagacattttacgaccttcagaatcacgcactaagccatgaatcaatgtgtctttaaaaggtctctcaccagtaaattcaacagattggaaaatcattctagatacccaaaagaaaataatatcgtatccagttactaaagtattagttgggaagaaatgttggaaatctggactctcagtatctggccagcccattgttgaaaatggccataaagccgaactaaaccaagtatctagtacatcttcatcttgttcccattcagaaaggttttcaggttctttttcaccaacataaatttcacctgtttctttatgataccaagctgggattctgtgaccccaccataattgacgcgaaatacaccaatcgtgaatgttatccatccaagtttcatatgttttttcaaatctagctggtacaaaattcactttgttttccgttttttgaagttctaatgcttctgcagcaagaggttccattttcacaaaccattgtagtgaaagatagggttctactaccgctccagttcgctctgaatgtcccactgaatgcaaatgaggttcttgtttgataaataaacctaagtctttgaaatcttgaataatttcttttctagctacaaaacggtccagaccatcatatttaccagcattttcattcattgtcccatcttcatgcatgacaataattcttggtaaattatggcgattccctacttcaaaatcattcggatcatgtgcaggcgtaattttaactgcaccagagccaaactctctttcaacatattcatcagcaacaatagggatttctctattcaaaatcggtagcatgatagttttacctattaagtgttgatatctttcatcttttgggtgaaccgcaacagctgtatcacctggtattgtttcaggacgagttgtagctacttctaggtaaccagaaccatcagttaatggatatttcaaatgatagaaactgccttcaatatctttatgaattacttcaatatcagataaagccgttttcgcttctggatcccagtttattatatattgaccgcgataaataagacctttattatataatgttacaaatacttttttgacagcatcagataaaccatcatctagtgtaaatcgctctcttgagtaatctaaaccaaggcctaacttctcccattgttcacggataaactctgcgtattcttctttccattcccaagttttatccacaaagttttctcgtcctaagtcataacgagaaatattagattcttttaatttcgcttctactttagcttgcgttgcgataccagcatgatccattcctggtaaatataatgtgtcaaacccttgcattcttttcattcgagtaataatatcttgtaaagttgtatcccacgcatggcctaaatgtagttttcctgttacgtttggtggtggaataacaatgctgtaaggttctttatccgtatttccttctgctttaaaaaattctttttctagccaccatttatatttacctgcttctacgttactcggctcatattttgtaggcatatttatttcattgtgttcggttgtcataatgattcctccttttttgggcaaaataaaaaactcttctcatcctcataaaaggacgaaaagagtattattcgcggtaccacctttttacccacagaaaaaattgcaggcacttcattgtgttaacgatagagaaatctaccggttattccttactataagttcaggaatactgctccaaggctaccttcagacgttatttttgaaagcttgcaccaaccgctttctctcttttgaaaaataaatgtcctactcttcctcttcattgcatttgattctatatactagaaataattttaacaaaagtttcaagattcgtcaattagcctcgaagtattttacatgtagtatcaaatgcttccaaggtcttatcaatttcgttctcggtgtgcatcgtagaaatgaagacaccttcaaactgagatggtggtaagaaaatgccttgacctaacatttcgcggtaatagtttcggaaaaattctagattacttgtttttgctgtatcaaaattaatcactttttgatcagtgaagaaaaagccaaacatcgaaccagccttattaatcgagagcgggacttgtcttctagcggatatctctgtaagaccttcttccattcgcttaattagggtacggaaaacatcatagtgttgcggcgttaattggcgaaccgtttcaaagccagcattcattgctaatggatttccggataaagttcccgcttgataaatagaaccagcaggggcaatctgttccataatttcttttttacccccataagcaccaactggtaaaccaccaccaatcacttttcctaaacaagtaagatcgggcgtgaccacataatagccttgagcagaatagtaatctactcgaaagccggtcataacttcatcaaaaatgagcaaagaaccaaattttgtagtaagctctcgaagtccttctaaaaaaccttcaattgggggaacgacacccatatttcctgcgactggttcaactatgacagctgctatttcttctccatatttttcaaaggccagtttggctccttcaatatcattgtatgggactgttattgtatctgccgcaagaccttttgtaactcctggagaatccggtaatccgagtgttgctacccctgagccagctttaattaataaagaatctccatgtccgtgataacttccttcaaatttcaagattttttctctctttgtataaccgcgagccaaacgaatagcactcatcgttgcttccgttcctgatgaaaccatacgaacgatttcaatagatggcacgcgttcaattactaattttgctaattcagtttcaatctcagtaggtgtcccaaaactggtacctttcagagctgcttttgtaatagcattaacaacagctggatcagtgtgccctaaaattagggggccccaagataacacgtaatcaatatattcattaccatcaacatctgtgatataagcgccttttccgtggtccatgaaaactggcgaggcatctacagaattgaatgctcgaacagggctatttacaccaccaggtaagacttttttggcttctttaaaggccttttcggattttgaatagttttgcaaatttcttacctcctatttatttaagtatttagatacatcttttgcaaaataagtaatgataagtgttgcacccgctcgtttcatactggttagcatttctataacaattttttcttcgtctatccaaccattttgcgcagctgcttttaccattgcatattcaccactaacattgtaggcaactactggtaaattggtattattcttaacgtcgcgcatgatatctaagtaagataatgatggttttacaataagaaaatctgcgccttcttgttcatccgactttgcttcgcgaagagcttcttcacgattggcaggatccatttgataagatttcctatcaccaaattgaggtgcactgccagcagcatcacggaacggtccgtaaaaagcagaagcatatttaacagcataagacataattgggatatcataaaacccagcttcatctaacccttcgcgaatgacttgaacaaaaccatccatcatattagatggagcaatgatatccgctcctgctgcggcttgactgacagctgtttgtttcaataattcaagcgattcgtcattgagaatttcaccgttttcaataacaccacaatgtccatgatcagtaaattcacataaacaagtgtcagccaccacaagaattttaggaaaactttttttaataagtcttgtagcttcttgaataattccgtggtcgtgataagcttgcgtaccaactgcgtctttttcggcaggaatgccaaataaaataaccgctttaataccaagactttcaactacgcgcatttcttcttctaattcatgtaaaggatattgaaaaaccccaggcatagaaactacttctgtttttggttctttgccatctttaacaaaaatcggatagattaaatcatctgtatgtaaaactgtttctcttactaaatcacgcattgttttggtttttcttagacgacgatgtctatcaaattgatttttcattttaattcctcctgtattatcaaatcagctaggtgcttcatggtgaaggtttttggttgatattttacttcccatccatctgctagaatggcctctgttgtaatactaccaattgatgcgatatgccacttctctttttgagcagggaatgatttcgcgatggaatagaagtttttccatgcagatgggctggcaaaaacaattatttgtgtttcatttagtttcagttgttcggttaacagttttttagaagcctctggaaaaattgtttcgtagagctcaatcgaaaaaacgatataacctttttctatcaatgtatcttttattattgttctgcttaaattactttgtggtagtaagatacttgttttctctgggttctcgtttaaccattcttctaaaaatacttctgactgatagatagatgggacaaaacttggttcgtgaccaaattctgccaacttttcttttgttttttcgccgatgacagctattttgtaattggatctctcatattggttcgtgaagaaatattctacagcattagcacttgttaaaaaaagccagtctgtttcttgttgttctcgggtcaaattaatttttataggttgtgttttaataagcgggatggacatcacctcataaccattttgtgaaaaataggtttgccatggtttgtttttactcgcttctcttgttaaaacaacttttttactcatacatttctcagttctttgataatagtatctgcaccttcacttagcaaatcttctgctactttatttccaatttcacttggatttgcaccgacttgttcggattcaagaatgatggaaccatccgcattaccaactaaacctttaaactgaacgaattcattagctcttgtagcaaagcctgcaatcggaatttcacagccaccgtttaattttttcaagaaaacacgttctgcttctacacaaattccagtttcttcgtgatgaatagaagttaacatatcgcggatttgttgatcactttcgcgacactcgatagcaagtgcaccttgtccaacagctggcaaacatacttctggtgggatgtcttctagttttaatgtagtattttctaaccaacccatacgagctaacccagcttttgctaagataattgcatcaaaattttctgcatgtaatttttgaagacgtgtatcgatattgcctcgaatcggtttaatcacaaaatcaggtcgatgttttagaagttgtgccgctctacggaggctacttgtaccaatgaccgagccttgtggtaactcatctagagaattcacttgattgaaaacaaagcaatctaatggagattcacgttttggaatcgcgccaataattaacccttctttcaaacttgaaggaacatctttcatactatgtaccgcaaaatcaatcgcttcatcacttaaagcctgctccacttcagatacaaatagaccttttccgcctactttgctaagtgttacatctaaaatacggtccccttttgtaacaatttcttttatctcaaaatcgaattcaggataattttctttgagcttattaatcacccaattagactgagttaaagctaacttgcttcgtctagaaccaacaattattttccgtttcatccgttaactcctcgtttcggcttgttctttttctattacagtaacatctgtttcactcaacccaaaaatacgtttaaaatgttcaatacttgtagttgcatcttcttctacagacatttcttttaactctgagataggttgttttagcatttggtttataatgcttttcatatgttttccaatttgaatgtattcgcgttctgttagtccaggaagtttattttctaaactagtcatagcaacttcttgcatatctaacgctttttcacgcaaagcacgaataacagggacgacgcctagttgtttttcccactcgaaaaagttacgaacttctacctcaatagtattttcaagttccagaacgattcgctgccgctctaatgagttcgcactaacgacccctgccaaatcgtcaatgtcatataaatggaaattgggaatgtatgaacaatcatgttcaacatttcgcggtaaaccgatatcaatcacaagcatcgaactcgctttttgttccatcaaatcttgcatagccgcttgtttaataattggttctgtcgcacttgtggaaacgagaacgatatctgctagcatcaaatgttcattcatattttcatatgcgcccacttttgcttgaaattgatttgctaataattctgcattagatttagtgcggttgatgatagttatatctgcaataccactcccagcgagattttgcaaagcgagttcactcatttcccctgcaccaactagaacaattttcttattgtctaatgaaccgtataatttttttgcaacctctacagcggcataactgacagaaacggcattttcgttaatttttgtatggtgatgtactttttttgcgaaagtaactacttcacgaaacagtttatttaaaagtgtacctgttgtctcagtttgtttcgcgatttcgaatgcatgttttacttgtccgagtatttgtgtttctcccagcacaagcgaatcaagtcccgcggttactttatataaatgattgacagcctctgtttcctcatggaaaaacaaataaggctcgattttttccatatccatttgaaaccagttagccataaaacgttttaagtagtatctacctgtatgtatttgatctacaaccgccacaatttctgtccgattgcatgtcgaaataataacattttcgaggatgcttttttcctgctgtaatgttactaaggccatttcttcttcggtttctttaaaaactaatttttcgcggatgtcgattggtgctgtatgatgattcagccccatggtgagaataaacattcgataatcctcctaaaattaaattgaactctaatacattctaccacttttcgatgtgtacaccaaatagtccgtttttgtatttaaacggaaaaaagagctggatttttcattccaactccttctattattccattccttctttgataaactgccatgcttcgtcttttcccatttttgtttcagaggaaaataagacaaatttgtcatctggatcaaaatcaagtgtttcgcgcacaattttagcatttttttgccatttgctacgtgggattttgtctgctttcgttgcgatgacaatgacaggaatatcgtaatattttagaaattcatacatcattcgatcatcttcggttggcttatggcgtaaatcaacaatttggataacaccgcgaagctgctcacgagaagtaatatacgtttcaatcatgacgccccatttttctcgttcggttttcgacactttcgcgaaaccataaccgggtacatcaacgaagaaaagtgcttcttcaattttataaaaatttagtgtttgtgtttttcctggtttttgtgaaattcttgccatacttttgcggcgaatcatcgtattaataaaagatgattttccaacgtttgatcgccctgcaagtgcatattctggaaggtccgtttcagggtattgctctggtcgaacagcgcttattattagttctacattatttacatccataattttccatcctgttctattcattatcttttactagtataacggaaaaagaggaaaaaagcaccatgaaaaaatactgccccctttaagagacagtattttcgcaattaatatttgcttacttcagcaacaacttgtgcgataaacgcatctaaatccattgtttcagagtctttggagccgtaacgtcgaacgtttacagatccagcctcaacttcttggtcacctaatactaacgcataaggaattttctttgtttgtgcttcacggattttatagcctaatttttcattacgatcatccacttcagctcgaagtccagctcgttgcaatttatcttgtacgccttttgcataatctaaatgtgcatctgcgttaactggaataatttccatttgtactggagctaaccaagttgggaaagcacctttatattcttcaattagataagctacaaaccgttccattgttgatacaacaccacggtgaataacgactggacgatgtttttcaccatcttcgccaatatatgttaagtcaaagcgttcagggagtaagaagtcaagttgtacagtagaaagcgtttcttcttttccaattgcagttttcacttgaacatctagttttggaccgtaaaatgcagcttcaccttctgcttcaaagtaatccatttccatttcgtccatggcggatttaagcatggcttgtgctttttcccacatagcatcatcgtcaaaatatttttctgtatttttcggatcacggtagcttaatcggaaggagtaatctgtaatatcaaagtctttatacacttctaagattagttcgacaacacgtttgaattcgtctttaatttggtcaggacggacaaatacgtgtgcatcatttaaagtcattccacgaacacgttgaagtcctgatagtgccccactcatttcataacggtgcatcataccaagctccgcgatacggattggtaattcacggtagctatggatatcatttttatatatcatcatgtggtgcgggcagttcattggacgtaacacaagttcttcgttatccattttcattgtagggaacatatcttcatggtagtgatcccagtgaccgcttgttttgtaaagttccacgtttgccataattggagtgtaaacgtgattgtaaccaagacgttcttctttatccacgatgtaacgttcgataacgcggcggatagtcgcaccttttggcaaccaaagtggtaaaccttggccaacttcgatactatttgtaaataattctagttctttacctaatttacgatggtcacgttctttcgcttctttttgcatttggataaattcttttaagccatttttatcgaagaaagctgtaccgtaaatacgttgaagcattttgttgttgctatctccgcgccagtatgcaccagccacgctaagcagcttgaacacttgaattttaccagtggaaggaacatggactccgcgacaaaggtcgaaaaattcaccttgtgtataaattgtcactgtttcatcttctgggattgcttcgataagctctaatttatattgatccccaattgctttgaaacgtttaattgcttcttcgcgagaaacaacttcgcgctcaattggaacattttcacgaacaattttttgcatttctttttcgatttcaacgagtgattcatcactaataactgcttctgtatcaatatcataatagaaaccagattcgatcgctgggccaacgccaaatttcacatctggataaagtcgttttaatgcttgtgccattaaatgagctgtactgtgacgtaaaataccaagcgcatcttcatggtctggtgttacgatttcgattgctccgtcttcgtggattggtgttactaaatcaagtaactccccgtttaatttacctgcgagtgctttcttttttaggcctgggctgatggaagcggcaatatcagctgttgaaacgcctggctcgaattcttttactgcaccgtctggaaatgtgattttcatactaatctctccttttcttttttaaatgtggttaggagggcaaaataaaaaacccatccctcctgttgtcaagggacgagtttatgctcgtggttccacccaagattcagaaatagctaaaaataactacttcactcttgtcgcttataacggagcgatccgtctattattactagttaaacacgttcctaatagaagttccaaggtggtccaaatttaagttccaatagaaggttcccagctaacccttcctctctaaaattttccgttaaattggttgtccttttcatcactttgttttatattacttcaaattataagcccgattaaacatatttgcaagtactttttagaaacggcgatttttgccttctaagttaacctcttttgacaaatagcgtacgcgttccataattcggcgagcttttagtttttcttccgtaccattttgggcaaacattaaatgattctctaattgatccatattgtaatttgatgagaagaaagttggtaattcctcttgcatccggaattgcaaaattgcacccaatacttcatctcgcgtccaagctgtcatggattctgcgccgatatcatcaagcattaacacttctgtttctttcgcaaattgaattttttcaccgactgtattgtcagaaatagactgtttcacttcgcgcatgaactctggtaaataaacaagtgttgttgaaattccttttaaagcaagttctttcgcaagcgcgcctaacaaatatgatttcccggtcccaaagctaccatgaataaataaccccttcacacgttctccacttttaggaggataattatttaaaaattgatatgcttcaacgagcgctaattgacgagattcttcatccgtataaaagtccgctaaattcgcatccactacttgtttaggcatataaagggatcgaattctccgctcgactgcacggcgtttatcttcttctattttctctttcgtcgggtaataggtgacggtgatgaattccccattaaggacaagttttggcgcatagccgggcattaaggtttcttcctgttccgtgaactttttgtgttgcgtcataaattcatataaattagacaagttttgattaactaattgctcggtaacctcttctttgtgctctttgaaaaaatcttgaattggctgataatggagaacttgttgttttaaaccttggtattctttttcaaagtcacgaccttcaaaaagctgtcctaatgttctttcgatgttgtccatcttcttcacctaccttttatttagtcgttctttaatttcacgaacttgttcttcgagtgtttgtttttctttgtctgtcattttattttccgctggagcaacttgttccttatcaaaccaatccggtaaaatttcttttcgcgttgatttttgataatttcgtttgtagttatttgtttttggtgtagctggctcttcttgaagtcgtttgtatttttcgtgctcttgccacgctagatccattgcttcttttgctgtttttacattttttcgtttccagtgagcagcaatcgtcatcatgtaatttttagaaagcttccggtcaaggcggagtaaaacatactcgattaatacattcatcacaggaaccggtaaattttgctggttcatgacttcttccacaacgcgcaaatcggtttcagcgggaaccgcaccatctgaaatgtccaccaaaagttgaaatggtgtgatgctctctaaatatacttgcagtgcttcttcatcatttaacgtttcttctggttctttatttacagtagtttcctgcttcatttgcagttttggcgtagccccgtgttctatagtgtagccttcgcgaacgattttacgtaaataaacgatatcaatctcgccatttgcatcaagtgctcggtacaaataactcggcatatctttttcagaaacttgataaatcccattcaattttaaaatagtttgacgcacttctttggttattttttctctggaaatcatccctggtgaaagcaaactcaaaaataaattaaagtcaaaactcgcgccgtcaaattcaatttcttttggtgtaactttatctaccaatttttgaccagattcagccgtaacagcactattaccacctttaaacggttcaaaaacatcttgaaacgaacgagtaatttcgctgtatgtatctgtttcaaatacctcgtctgcaaaaaaacgacgcaaacgttgaaactgtgcattgccaattttgctatataaataaatatttaatagaccatctgaaaaaaacttttctggtgataacggtggcaagatttcgtaaatataaaagcgttgatcgttttcggttttcacataactctttaaaagacctaagccttctaatttcagccttgcctcgaacaacgctttcaaactaatatcaagcatatttaaaagttggacgtgcgaatgcgcttctgaccacagtctgttttcctcgacttctgtaaacagtgtttggtataaagcaaggcattccgcccccattagcggttgatataacatcgtaataatttttctgtcggcaccggtcaagattccacttgctttcacttgatagctgtctaccgcttgaagctccatccaaaattccgtcaatttactcacctatctttatttttttccattaaatcttttaactcttcgacaaaaacgctgatatctttaaattggcgataaaccgaagcgaagcgcacgtaggctacttcatcgagattcgctaatttattcatcactttttcaccaattaagtcagacgctatttcgctgtctccaatatttcgcagttcgcgttctacctcattgacaatttcttcaatttgttctgcgctaactggccgtttttcacaagctcttattaaaccgcgtcgcactttttcacgagcgaattcttctcttgctccgtcttttttcacaactattaaaggactctcttctaccttttcaaaagtagtaaaacgaaatccgcatttttcacattcacgccgtcttcggatggaattgccatcatctgccggtcttgagtctacaacacgtgtaccattatattgacaagtaggacatctcataaaaaaccactcctatctctagctttctcaatctgtttatttgtatgcctcattataccatgtgaaagtaagggtggctatttgttctttacaaaacgctcgataaatgtataaacttgtttttgtgtcttttcaagtgattcgttattattaatgacaaaatcagctttttttgccttttcatcaattcctatttggctgttaatccttgctaacgcctcttctttagtaagattatttcgctccatcaggcgctttaactctgtttcaggggtggtccaaacaacgataatttggtctaccaacgattctaaatgactttcaaacaaaagcggaatatcgaaaaagacaagctcctcgcctgctctgaaaaaacgttcgcgcgcttctaacatatattctttcacacgtggatgcgtaatttcatttaacttttcacgcttttccttatctttaaaaataatttttcctaatttggctcgatttaaagtgccatctgcaagtaaaatttcttccccgaaataagcaacgatttcctttagtccttctgtgcctggttccactacttttctagcagcaatatctgcatccactaatggaattcccgcttgctgaatcatgctactcactgtcgatttccctgtagctacacttcctgttaatccaatcgttttccccatgatttcagctcgctttctatttttggcaattcgggcaaaaatgtgtcccacgtccatttaatttgattttttcaatcggcgttccacaaacaacacacggctcgtctgttttgccgtatacttttaatttattttgatattgtccaagcttaccttgcgaattcacatacgttctaacagtggagccaccaagtgctacagcttcagtcataatacttttcgtcgctttaaaaatacgtttaatttctttgtctgaaagtgagttagctgctctttccggtcgtacttttgcttcaaaacaaatttcatccgcataaatatttccaactcccgctactaacttttgatcaagtaaagccgttttgatggcgcggcttgtttttttcacaccagttgcaaaatccgttagtgtaaaagcttgcgtcagcggttctgggccaagctttttaatcgaccgagtctcaccctcaccgtatttattcgttacttccatcgtaccaaattttcgcacatctaaaaaacgcaattccgtgtgatcctcaaaatgaaaaataatatgcgtatgcttgctgacctcttcattttcatccattaaccgaaatttaccttccatccgtaaatgcgataaaatcgtacagttggttaagtcaaaaagtaagaatttaccacgacggcgcacaccctctatttcttgcccgacaagcatatgcacaaactcatcgggtggtgttgagacaatcatttttggaacacgaactattacttgatctatttttttacctgggactaattcttgtaatgttgcgcggacattttctacttccggcatttctggcatttataaactccccgtttctctatttatttcgcgtcgtaccaagtgtcaccaaaggcgctatctactttaagcggcacagaaagctctactgcattttccataacatctgggacaatttcttctaatttagctatttcagcttcaggtgcttcgaagattaattcatcgtgcacttgaagtaataattttgcttctaatttttcagatactaaacgctcgctcatcagaatcatcgcttttttgataatatcagcggcactaccttgaataggtgtgttcatcgcagttctttctgcaaatccgcgaacattaaaattacgactaacaatctccggaatataacgacgacgatgtaaaatggtctctacatagcctttttctttcgcaaaacggacaatgtcttgcatatattctttcacggctggataactcacaaagtaacgatcaataaagtcttttgcttctttacgcgtaataccaaggttttgcgaaagcccataatcactaataccatatacaataccaaagtttactgctttagcttgacggcgcattagtgaatccacttcttccttctccacatgaaacacgtccatggctgttttcgtatggatatcgtaatcgtgcttaaatgcataaattaaattctcatcttcagaaatatgtgctaaaactcgcaactctacttgagaataatcggctgaaaacattttccaaccaggtttactcggcacaaaaacttgtctgattttccgaccttcttctaaacgaatcgggatattttgtaagttcggatcgactgaacttaaacgtcccgtttgcgttaatgtttggttgaaacgtgtatggaccttatgtgtttctttatccgtcactttaagcagcccttcgatataagtggactgaattttaccaagttgacgatataacaaaatttcatcaataatcgcgtgttttccagacaaactttccagtacatccgcagctgttgaatagcctgtttttgttttcttgactgggggaagttccagcttttcaaataaaattacacctagttgtttcggtgaattaatattgaattcttcgccagctagtgaatgaatggatgcttctaatgtttttagtcttccacccagctctactttcatatcttcaagccgatctgtatctacgctgactccttgcatctccatttctgctaaaacaaatgttagtggtagctctaggtcttccatcaaagctagttgttcatttttctctaaatcatcaactagtcttttctctaagtcagcaatggccactgctttcctagctaagtgtgccgcaacaatgctttcttcaggagtgctacgtttagcaccttttccgtagactgcttcatctgtttctacttctgtgtaatcatgtcttactgcaacacttgtaaaatcatcaattgaatcagatggatttaacaagtaagatgctaacatgatatcaaatgtgataccagaaattgccaaaccaatgcggttcattgcaactattgttttcttcgcatcatacactacttttgtttgatcactttctacccatttgcggaatgcctcactactttcagctgtttcttttgtaaagaaatacgttccttggctggaatgtactgtcagcccgatgaagtttgctgtatggtaattatcattttctagctccacataaagtgcggttttcccaccaaaatgttgttcttttaattccgttactatttcaaaagacaattcttttagttctttcgattcctccggtgtatctccttcgatatttttcaaaagtgttgtaaaattcatttcttttaataaagggataactttttcagtttgatacccgtcatatttcgtgctttcgactgtgcattcaatcggtgaatccacattgattgtagctagctctttacttaaaatagctaattctttattttctagtactttttcttttagttttttaccggaaatttcctcggcgtgctctaacacactttccaccgttccgccaaattcatgtaagagttttaaggctgttttttcaccaacgcctggaatcccaggaatattatcggaggaatctcccattaaacctttcatatcaatgatttgttcaggagttagattgtatttttcttttagtgtttctggtgtgttggtttccatatcggctatgccttttttagtaatataaaccgttgttttttcagaagctaattgtgttaaatcgcggtctccggtaataattgcaacttccattccatctgcttccgcttttttcgtcaatgttccgataatatcgtctgcctcgtaattggccagttcatattgcgggatatcatacgccgttaaaagctctcggatgaatggaaactgttcagataactcacttggggttttttgacgtccgcctttataacctttaaatgttgtatgtctaaaagttgtttttccagcatcaaatgcaacgagcacatggctgggtttttctttttcgagtacattcatcaacatcattgcgaatccatacaccgcatttgtgtaaacacctttatcgttatttaaaagtggtaacgcataaaaagcgcgattcgcaatactatttccatcaattaatactaatttattcacagggatatcctcctcgatattgtcattcacttgtgtctattttaccataggaacataaaaacaaaccacttatccgaatgggattaaatggtttgtttcaaaaacgcacatttaaggttaaatgtaaaattacagactagttttggagctgaaaaacgaattattttagaagttttttattaattcgtccgcaaattccgaacatttaacttctgtcgcaccatccattaatcgagcaaaatcataggttaccgttttcgcagcaatggttttttccattgattgattaattaaggcagccgcttcaccccaaccaatgtgttcaagcagaagtgtcccagataaaataaccgatgacggatttactttatcaagaccggcatatttcggagcagtaccatgcgtcgcttcgaaaatcgcatgaccagttaagtagttaatgtttgctcctggagcaataccgattccacctacttgagcagcaagcgcatcggaaatgtagtctccattcaagttcattgtagcaactacatcaaattcagctgggcgagttaagatttgttgcaagaaaatatccgcaatcgaatctttgactaaaattttcccagcagcaagcgcttcgttttgtttcgcgtcagcaacttctgttccttctgcttctttaattcgatcatactcattccaagtaaatactttatcaccatattcgcgttcacataagtcatagccccaatttttgaaagctccttctgtgaacttcatgatattccctttgtgtacgagcgttaatgatttacgaccttctttaattgcatattcaatcgccgaacgcactaaacgctccgttccttctttggaaatcggcttgataccaattccagaagtttccgggaaacggattttatcaacaccaaattcagattttaagaagtcgattagttttttcgattctatgctaccttctttaaattcaatccctgcataaatatcttctgtattctcacggaaaatgaccatatctgtgtcttctggacgtttcactggtgaaggaacacctttgaaataacgaactggacgtaaacaaacatataaatctaactcttggcgcagggcaacgtttagtgaacgaatgcctcccccgattggagtagtaagtggtcctttaatagcaatcaaatattcgtcaattgtatctaaagtcgcctgtggtaaccattctcctgtttgcttgaatgctttttcgccagctaatacttctttccaagcaatttctttttcaccattgtaagctttttttactgcggcatctaaaacgcgtttcgcagctgcccagatgtctggaccagttccgtccccttcaataaaaggaatgactggattgtttggtgtttttagcacaccgttttctacttgaattttttgactcataaagtttgttcctcctcgattaaattcgttcttctacaggtaaataacttctattttcaggtccaacgtaaattgcacgcggacgaataagacgattatcacgatattgctcaaaaatgtgcgctaaccagccggatacacgacttacggaaaatactaatgtaaataaatcacggtcaattccaagcgcatgataaacagatgctgaatagaaatcgacattcggttttaaatgtttcaattcccaaacagattcttctacttgcagagaaatatcaaaccacttctcttcgcctttttcagctgttaattttctggacatttcacgcaaatgttgcgcacgaggatctccgccacgataaacacggtgaccgaatcccataatcttttgcttcgtatcaattttttcttgaatgtaattacgcacatctccagcttgatcaatttcttctagcatatcaaatacacgttcattagcaccaccgtgaagtgggccttttaaagcgccaattgcggctgttactccggaataaacgtccgaaagcgttgccacacaaactcgtgctgtaaaagtagacgcattaaattcatggtcagcatgtagtacaagcgctttattcattgcttctactgataattcatctgcttcttctcctgtaatcatatataagaaatttgcagccatatttaaatcttctctcggtggaattggatcaagtccgcgacgaattctggaaaaagcggcaacaatggttggcatttttgcttgaagtcgtaagcctttacgataaacggcttccccgtcgtctaattcagcttctgtatcaaatacaccgagcatggaaacagttgttcttaaaacactcataggatgtaatttttgatgattttgcattcttagacttgtgatgattgtttcagacactgccatattttcttggatttctcgtttaaattttttaaattcatctttattcggcaagcgtaaatgccataataagtagattacttcttcaaaagaagcgttattttccattaaatcgtcaataccatagccaacataagttaacatatcatcaatgatagagctaatggacgtttcagcaacatatacattttctaatcctttagataacgtcatttcatttcctccttttatccttttttacgtatgtacttattttatgaatgcaactaactgcattgccatgtaagcaataccagctgcaattaccggtccagcagctatccctctaaaaagcaccactgctaaaatggtcccaaatactaatgagacagtcacttgtggatcaacggccatatagcctacaccttttttcgctaggatagaaacagcaattcctgcaccgagaccaatccagccagcagccgatttaaaagaatcaattaagtctttaaaaccgatttgaccagttgcgattggaattaagatagcaaccgtaataatcgttacaccccaatttatcccttttgcttggattatttccattactttgccgtcgacgtgaaataacttcaataaaataacgacagctacagcaatgataagcgaattattttttgctataagtccgagaagtaaaaaaagaagtaaaaacaacatactttccgtaaacatattaagtcacctttcaatatcacgcatctaggaagcgagataacaattattatatcataaacataccttatagtaatactaaaatgccataaggaaaatgaattgcctttttttcaatgaaacctctatagaaagtttttcccatagaggttttaattacatatcaaaataataatattgcgtatgtttcttttgatttccaagccattttgttaatttaggttttaatagtttacgggaaaatggaataaaaatgagcagtccaaggatagttgttataacacctggaataattaataaaaaaccggcgataaaaaagcacagactatccaataaatatggggctactgtgcgtccatctcgtaaattccggaaaagattgccaccaagacgtttgaaaataaaaacaccaaaagcacttgaagctatttgaataaaaagaaggggccaaaagccgattacttggaataaccaaacgtacataatcaattctattaagccatataaagcccaataaagaataaattttctcataaaatcaactccaatacttactccctattataacctattttggcgtaatcgaaaaacaatacagcatgcacataaaaaaagcgtcccgcatgcgggacgcttttagaaagttaactattaatgtgttgctgttttgccgttatatacaacaccttgacgagaatcaactgtgatgatttcaccatcttttacaagagatgttgcatctttagcaccaacgataacaggaatgccaaggttgattccaacaactgctgcgtggctagttaagccgccttcttccacaacaactgcagcacttttctcgaatgcaggaaggatttctttatctgttgttttaacgattaagattccgccttcttctgctttttcaagtgcttctgcattggatttagcaacgattgctttaccgataacagatttgctgccaattccttggcctttaactactttttcaccaattaattggattttcattacgtttgttgttccactttcagtaactggaacaccagcagtgatgataattaagtcgccttgttttgcaacgccagaagcaagagattctttcactgcaaggtcgaacatttcatctgtgttgctaactggagtagctagacgaggataaacaccccatgaaagtgctaaaccacggtatacatgctcgttgaatgttacagcaacgatatgagattttggacgatatttagagatcatacgcgctgtgtgaccactttgagtcgcagcaacgatagtttgaacgtttaagtttttcgcagtatggccaactgcttgaccgatagcttctgtcatatccgtattttcgtgaagtttaagtgcaaatttatcttgagcaactagtacttcttctgtacgaacagcgattttcgccatcattttaactgcttctactggataatccccagcagctgtttcaccggataacataatagcatctgttccatcaaaaatcgcattcgctacgtcacttgcttcagcgcgagttggacgtgggttacgttgcatggaatcaagcatttgtgttgcagtaataacaggcttaccaagtttattacattttctgataagttctttttgtacaatcggaacttcttcagctggaatttcaacaccaaggtcaccacgagcaaccattaggccttgagatacttgcaagatttcgtcgatattgtcaacgccttcttggttttcgattttaggaatgatttgtacgtgagttgcgttatgctcttctaaaattttagtaatttcaagaacatctgtagcacgacgtacgaaagatgcagcgataaagtcgataccttgttctaaaccaaagcggatatcagcagcatctttttctgtgattcctggtaggttgatagaaacgttaggtacgttaacaccttttttatttttaagtacgccagggttaagtactttagttactagttcgcgattagcttcgtctttttcgattacttcaagaccgattaagccgtcatcaagtaaaatggaagaaccaatttctacgtcatcataaagttctccgtaagttacagagaatttttcttttgttccttcaacaggagtcatagaaacacgtacaacatcacctgtttggaattctaattttccaccgaccatgtcgtttgtacggatttctggaccttttgtatcaagtaagatagccacttgtttaccagtttttttcgatgcttcacggatatttacaatacgcgcaccgtgctcttcaaaatctccgtgagagaaattaaggcgtgctacgttcattcctgcttcaatcaactgaactaatgtgtcaactgactcacttgcaggaccaattgtacaaacaattttcgtttttttcatgttattactcctcctagaacttagctattcattcgtatttattataaacatatcttccacattttaccagtaacaaccttgtaaaacaagtcagtttgtgaataaaattgcaatcgtggcgcatggtaacgataacaagaaaacgttttccagattgctacagcatgcttaattaacgatttacttttctttaccctcaaagtttatttttaatacgttactaaaatttttcacaaagaaaggctaccatgctttgtcatggcagccagctcttcagccgttttaaatcgacaaaattgatgcaagatcaaataatttttgatcaagagtgtgtttttctttcaaaatctcactaatgtcattttcgacaattctattttcacggattccaacagctaatcctccgcggttttctagcaataattctactgaacgtgcaccaagacgacttgcaagtacacggtcaaatgcagtcgggctaccaccacgttgaacgtgtccaagaacagttacacgtgcatgataatcgccatattcagctaattgtttagcaaattcattaccagacattacgccttcagctacgacgataatactatgttttttgccacgttcgcgacctttgttcaaacgatccacgacatcatccatattaaaactttcttctggaacgatgatagcttcagcgccaccagcaagaccagaccaaagagcgatatcaccagcgtcgcgacccataacttcaataatgaaagtacgttcgtgacttgtagctgtatcgcggattttatcaagtgcatcaagaacagtatttaacgctgtatcaaaaccaatagtaaaatcagttccagaaatatcattatcaatagttcctgggataccaatggttgggaatccacgttttgtaagtgcttccgctccgtggtaagaaccatctccaccaataacaactaggccatcgatttgatgttttttcaattgttcaattcctttaagttgtccttcttctgtagcgaattcaggatatcttgcggaataaaggaatgtacctccgcggtgaagtaaatcaccaacagaacctaattctagtttacgaatatcgccattgactagccctaaaaagccatagttaataccgtaaacttcaagtccttcatagattgctttccgtacaacagcgcgagtggctgcattcattcctggagcgtctcctccacttgttaaaattgcaattcgtttcattttacttaccacctcagacaatgatattgtttttcatcacatgtgtttattctacatgaaaaaaggtcaaatgaaaagcttcaacagagcacttttttaaacagcaagctcaacaaaaccccaattcaaaaaccggtctattccgatttatccaaaaaacggctttatagcttaaataaacataattggtctatacttgtgaagagataaactttctttcctcgtttggcatataccaaagaagcggatttcctaaaacaagggaatccgcttctttctttatttatatagtctcatatacaccgattttcttgaatttttcataacgttgttttattaattgttcttcagaaaatgccattagtgcatgtaaagacttcgtgatagttttgttaatttcttcggcttgcgctgttaaatctcggtgcgcaccaccttttacttctggaataattccatctgtaatgccaagttcaaataaatcaccagctgtaatccgcatggactccgctgcttttttcgctagactagcatctttccataaaatggctgctgctccctctggtgaaataacagagaaaaccgcattttcaagcatgaaaatttgatttccaacaccaagagcaagcgcaccaccacttccaccttcaccgattacaatagaaataattggtactttcatatcgctcatttcataaagatttctagcaatggcttcactttgaccgcgttcttccgcagcacgacctggataggcacctttcgtatcgatgaaacaaataattggtcggccaaacttatctgcttgtttcatcaaacgtagcgccttacggaaaccttcaggatgaggcatgccaaaattacggtgcaaattatcttttgtatctttaccacgttggtgaccgataaccgtcactggaatacccttgaaagttgcgatacctccgacaatcgcagcatcgtcaccaaatgtacgatccccgtgaagttccatgaagtcttcgaataaaagcgaaatataatcaagtgtcgtaggtctctccggatggcgagctacttgaaatttatcccaagcagtcatattgctataaatgcttgattctaacttagctaagcgtttttctagcttttcaatttcattggttaaatccacatcagaagtttcattgtactcttttaagtcagcgatcttactttttaattctaaaatcggtttctcaaattccatctcattcgccatcaacttcaccccctactccaggtgctttcacatgaatgcttaaaataaaacttaacttattttgcaaatcaagacgtgaaatacaatcatctagttgtccatgctttaataaaaactccgccgtttggaagtcttctggtaattcttcacgaacggtttgttcaattacacggcgtccagcaaagccaataagtgcgcctggttccgcaaagttatagtctccaagtgacgcaaaactagcagaaaccccaccagtagttgggtgcgtcattaccgtaataatcagtcctccgtgattgctaaatcgtttaaatgcagcagaagttttcgccatttgcataagggaaagcatcccctcctgcatacgcgcaccaccagaagcagtgaaaataacaaatggtttatttgttttatcagcatcttccacagcacgaagaattttttcaccgacaacagagcccatactcgccattctaaaacgagaatccatcactgcaataacaagtggattaccgccaatagtagcatgaccagtaacaatggcttcatttaaaccagatttttgcttatctttctcaattcgatccatataatcttcaaaaccaagtggatttgctgtcgttaaactagcatcaatttcttcaaaagagccttcatcaacaagcatatcgattcgtgcttttgccccaattggatggtgaaaaccacaataattacataccataagatttttttgcaattctttggtatacattatttttttacattctggacattttgtcataataccttctggaacatctgctttcgttccatcagaaggaattgtggcatattttctcttttttggttttgtaaacaagtctcctagcaaggataaccctccccatttacgctttctattgtggttattaacggtttttaatgttgtaaaaataaaaaatgaataaagacatgaaacacaaatcaaccgcattttcccacaagaagacaaaatgccagtctatccgaattataactggacagactgcgcaatattgttttccacgttaaactataacatactttctataaatatagaaagtctaagattacttaataactacattctctttaccaagcaactctcctaaagcttcttgcagctcatttgatggcgttacttgaatatttttcagttcagcagtttgtttcgttatcgcttgatgcacaatgaccttactgtcgcctttataacgcgctaaaatcggcttaatttgttccatttgctgtggttccgttaattttaggaataatcgtaccggggctttaatttcttttaaatcttctgctttattaataattaattggagttccccgtttctcgtatctgctttcacttgcaaaaagaggatctctcctttttgtgcaaagttagcgaatttacggtaacattccggaaacataacggcgctcaattcttttgaatcatcactaattgttaaaaagcacatcgtttcgcctttttttgttctaattgatttgacttcgtgtacataagcagccacttgataatttttgccggaagaaagatttgcaagtcttgtaatagcaaggttttgtaatttattttgatagtacgatactggatgcgctgaaacgtattgcccagtgtataatttttctttctccagcttttcatcaattgaaatgggtgcggttttccgatatctcggtttcatcttcttcaaaaattcgtcatcttccgcgaaaagattcatccctttcgaatcttcaccgagtaacgagatatattgtaataccgcatcaattgttgccaaaatcgttgcccggtcttcaccaaattcgtcaaaacaaccagaaaatacgagtgcttctaaaacagtttctgagagcattttatgtggcattctttcacaaaaatcaaagaaatctcggaaaggcgctttttttcgttcgttaataatttctaaaataaatttggttggcactttacgaataacacggaaactataacgaatagatgtctcattttccatttggaagtagtagttactatggttgatgcttggcgctaacatgctaattccgtagttttttgcttctgtaatgtattgggaaattttgtcatcgtttccgaaaactgagctgagaagtgatgacatgaacgcggctggaaaatgtgcttttaagtaagctaattgaaaagcgatttttgaataggccgctgcgtgacttctgttgaaaccgtagttcgcgaattggacaatcatatcatatacttggttagcgctagcttctgaatagcctttactcttagcgccttctacaaagtgaatccgctcctcgtttaggacatccgctttcttcttgctaacagctcgtcttaacaaatctgcttctccaagagaaaatccagccatttggtttgccacttgaataatttgttcttggtaaacgataacgccgtatgtcacttctaaaatagacgctaaatctggatgagggtactgaattttttcttttccgtgttttctagcgataaacgtatcaatttgttccattggacccggacgataaagcgcatctactgccacaacatcttcaaaagaagttggctttaattttcggagcacgcggcgaatcccatctgactcaaattggaatacccctgtcgtgtcgcctgtttggaatagtttcaatgtttttttatcctctaaagaaatatctgctaatgttaacggagtttctctagtataattgactgatttcaaaacacgatcgagtaaactaagatttctaagtcctagaaaatccattttaagtaagccaatcttctctaattctcccatggcaaactgggtcaaacgtgcgtctccactacccaattgtagcgcaacttgttctacgagtggcttatcactaattactatccccgctgcatgcgttgaaatatgacgcggcaagccttccagctgacaagcaacttcccaaatcatttcgttttcttttgaacttttaatatgattttctaaacgcggactttcttgcaatgctttttgcagcgtaatgcctaattgactcggaattaacttagaccattctgataatagtacggaattcaagccaaaactccgtgcagtatcacgaatcgccgctttagcagccaatgttccaaatgtgccaatttgcgccacatgtgcttctccgtatttagataccacatacgaaatcacttcatcccggcgattatctggaaaatccaaatcaatatcgggcatcgtgatacgttctgggtttaaaaatcgctcaaacagcaaattgtatcgaatcgggtctacatccgtaattctaagtgcataggaaacaagggaccccgccgcagaaccccgacctggacctgttaaaactcctgcctcacgcgaataacgaataacatcccaaactatcagaaagtaatctgcaaaccccatctctgtaataactttcaattcatattctaagcgttcctgatattccatccctagtaaatttcgttcttttaatcccgcaaaggctgtttgacgcaaaacatctgatgcattttgtccttcatttaacggaaatcttggtaataaatgttgatccagagcaatttcgacatgacaacggtttgcgagttctcccgtttcaagacacgcttgcttttcgaaagctgtttgccagtcacgttccatttcatcttgcgaggtaaagtagtttggtccggcaagtggcaaagtcgtccagtcaactgttcgattatcacgaatggccgttaaaacttctttcgcttgcgcatcttttggctctaaatattgtacatttttcgtcgcaacaaccggtacattttcttctgaagaaaaagtttctatttttgcgaaaagacgtggattttctttttgggcagataaataaacagattctttaccaaaaatttcgactaaatttgcataaacttctagtgctccctcgcgatcctcctccatcagaagtcgttcgatttctcctttggcaccaggtgaaataacaatcaaatcgctgctataagctcgtaaccagctttgtggtaattccggtccttcttcgcgcgtttgaatagcactcgcaatttttaataactggtgatatccagcggttgattccgcaattaatatcaactcatatgaattaattggatttaagtaaccttgtattgtcaccgtcatcccgataattggttttatatccgccgctaaacacttttgataaaactcgactactccgtaaagtacatttttatccgtaattgctaaggctggataatggtattcttttgctttagcgattagcttatcgatggacgctgtactagatagcaaatcataagcgctcgcaacttgtaaatgaacaaaccccactatcctctctcctttcaaaactctctttttccattatatcggttaagctaaaaaaaagaaagtgtgttcgtgtttttatataaaaataaagccagataatgtatccgactttatttttcatttatttagcggcacaaatcagttgcaatttcgccgtcatttcttttatttcttcttcattatgaagtgttgcgccagaagcgagtgggtgtccgcctccaccgtattctttggctagctcatttataactggtccttttgaacgtaaccgcgctctgaaaaccgggccttcttggatgaacataatccacgctttaattcccgccacattttcgatgcaagaaacaagcgccgaagcatcacgcggatccacttcaaactcgttcaaaagagtatcacttaaataaaccgtagccgcgccgttttcatccatgacaaagttttgcaaaatatatccggaaagtttcaccgtattttttggtaattcatataattctcggtaaagcgccggacgatcaaatggaaatgtcactaaatgcgcggataaacgtaaagtctcttccgttgtgcttggatacaagaaccgcccagtatcaccaacaattcccgcataaaggagtcttgcagcagtttcgttcaaaattaactcgtccgaaaacatttcccaaaaagcgacaatcatttcactacaagaagaagccgtcgtgtccacccaaagtaaatcaccatacgcatcatcatttggatggtggtcaatttttataagtgctttaccaaggttaaaccgcccgtctgaaatccgttcttggttcgcggtgtcacacacaatcacaagcgcatctttataagtttcatccgttatttcgtccactataccaagaaattggagcgacttttcatcatttccaactgaatagacttttttctcaggaaagctagcccggataatttccgcaagccccatttgtgacccatatgcgtctggatctggtcttacatgtctatgcaaaataatcgtttcatattgctttatttgttgtaaaatctcatttttcatcatttcgcccctgtttcattttaacgttccatcatttgacaagcgacaattgcttttccggtcaaaattccttctaagtaaagctctacatccaacttaccagccttacgccccatctccaaaattcgcggtttaataataattgtcgcgtccatttgaacaggttttaggaaatacattgttacattttcaatcgctacattccgttttttcatagaaaatagtttttgttgtacaacttcacaaactacttgtgtaaatacgccgtacgataatgttccaagcgaattagtcatttgcgggctaactttaaattcgtaatccgcctcttcaccagtatctgttttttcagaaagttggttcgcaatggtatcatcaatcgtttcgccgacttgcggttgtttttgaatcatttgcatggatttcaagatatcctgcctgctaacaattccgattaaagttaagtcatctttaacgactggaattacttcgatactctcccaaatcatcatgtgcgccactgaggcaacactcatcttcggtccaacagttaacgggtttttcgtcattactcgttcaatcgaaatactgggatttttttctagaatatccttactcgtcaccatcccagtcagtcgcatcgcccggttaactacaggaaaacgactgtgacctgtcgcttcttccattttgtgccaatcttccactttatcagacgtagataaaaatgcagttgtttctagtggtgttaaaatatcctccacaaatactacttctttttttattaattggtcataaatcgcgcggttaatcatcgttgcaactgtaaacgtatcataggaagttgataaaattggtaattctttctcatccgccaattgtttcacttcgtcgtccgtatcaaacccaccagtaatcagtaccgcggcgccacgtttcaaagcaagttcatgggcgctcactctgtttccgacaatcaataagtttcctgcatcggtatagcgttccatcgcttccactgtcattgctccaataacaaacttattaagcgatttgtaaagcccagcacgaccacctagcacttgcccatcgatcatattaacaatctcagcaaaagttaatttttcgatactatctttttgcttgcgttcaattcgaagcgttcccactcgtttaatagtagaaacaaaccctattatttctgcatctttaatagcccgataagcagttccttcacttacagacaagtttttcgcgatttttcgcacagatattttttctccaactgcaagattttcaatgtattttaaaatctgttcatgttttgtggccacgactcgttcacccattcctattttgttagatttcgataccttccccaatttcaagtacttttccagctatcccctcattaagcgatgcaacaaatttgtgcggatcttgcgctatcaaaggaaacgtattgtaatgcattggaacaactaatttcgcttgtaaaaatcgtgccgcaatcgccgcatcttctggtcccatggtaaaattatccccaatcggcaagaaagcaacgtctagcggatttaattcaccaattaatttcatatcagaaaacaaaccagtgtcccctgcaaaataaatatttttatcttctatcgtaaatacaatcccagttgggaaaccaaggttaacaatgcgaccatctcgaaccgtctgcgatccgtgaaaagcttgcgtcaacttcacttggccaaaactaaactgtcttttcccaccaatatgcattggcgccatattttcaagcccatcctctactgccaaaaatgaagctaaatccgcgttacaaataacggttgctcctgaatttttagcaatttcaactgtatcaccgacatgatcgtcatgcccatgcgacagaacgataaagtcaggcatctgctcttccgcttttaaatcacatttctcattaccagaaataaatggatctacgagaatagttgtatccccagtaattattttaatacaagactgaccatgaaatgaaatcttcatgttaaaaaacttccttcctgattcattattctatgtgtattattgtaccactatttattataaactactatataacacctcgtaaactaagaggtgtttattagcaaaatatttccttcgcatgttatcatgaaatagaaatcaattggaaagaaggtacaattatggaaaaaaatatcgatgtcttacaaaattggttaaaagaccaaggtgccgaggtaggatttttgacagatccagagaacatcgcctatttctcaggttatcatagcgagcctcatgagcgtgtacttggtttagctgttttctcagatagcgaaccatttctatttacgcccgctcttgaagtagaagatgttcgtggcggtgattggacacaccctgcatatggatataacgataccgagaaccctttcacaatcattgcagacgaaatcaaaaaacgcgttgcaaatccaagcaaatttgctattgagaaaaaacatatgagcgtagatcgctacgaacaattaggtggactattctccggcagctctttcattccgattgaacacaaaatcgaacaaattcgtcttattaaaacagaagctgaactaaaaatcttaaaagaagctgcgttactagctgattatgcagtacaagtcggcgtagacgaaattgcagaaggtaaaaccgaagcagaaatcgtggcgaaaatcgaatatgaaatgaagaaaaagggcgtaacagcaatgtctttcgatacgatggtacttactggcaaaaacggtgccctgcctcatggtactccaggcgaaacaaaaatcaaaaaaggcgatttagttttatttgatttaggcgttgttcataaaggctattgctctgatattacgcgtacagttgcattcggcgatatttccgatgagcagaagaagatttacgacacggttttagaagcgcaaattgccgctgtcgaaaaagtaaaagccggcgtaaaagcaagcgaaattgatttaactgctagaaatattattcgtgaagcaggtttcggtgattatttcccacatcgtctcggccacggccttggtgctagtgtgcacgagttcccttcgattacagaaacgaacagtatggaactgcaagaaaatatggtatttactattgaaccaggtatatatgttcctggtgttgctggtgttcgtatagaagatgatctcgttgtcacaaaagacggcgttcaagtattgacggaattcccgaaaactttgcaagtaatcgaataacaagaaaagcgaactttctcaaaggaaagttcgcttttttattaaattaattctttgctgtccgtataaggtaaatcgagagaatctgcaacagctttatacgtaatatgcccttgataagtatttaacccacgaagtaagaatgggtcattttgcactgctgcttctaagccttgattagccagtttcaagccaaatggtaaagttgcgttagtgagcgccaaagtggacgtccgcggtactgctcctggcatatttgcaacagcataatgaagcacaccatatttttcataggttggattgtcgtgcgtggaaacatgatctgtagtttcaaaaatcccaccttggtcaatcgcaatatccacaaggacagaacctggaatcatttgtttgaccacatgctctttgacgagtttcggtgcttttgctcctggaattaatactgctccaataaccaaatcagcttttttcacagctgtttcaatattaaaatcattcgacattaacgtttggacttgattaccaaaaatatcatccagctcacgcaatcgtttcagattcatatctaggatggtcacattggcacctaaaccagctgcaattttggctgcatttgttccagcgattccaccaccaatgataaccacttcacttctctctacaccaggtacaccacctagcaagacacccataccaccattcgttctttgtaaaaattgtgcaccaatctgagccgccattcgtcctgcaacttcactcattggtgaaagtagtggcaacgtatggtctgctagttctactgtttcataagccacactatttactttactctccatcaaagctttcgcaagcgttggttcatttgccaaatgtaaataagtgaaaagtagtaacccttctttaaaatatgtatactctgatgcaatcggttcttttacttttacaaccatatctacatcccaagcttctttagctgtctctacaatttttgctcccgcttgcacaaaatcagcgtcttgataattagagccaatacccgcatctttttccacgtatacagtatgtcctgcattcacgtaagaaaaaacacttgccggggtcattgccaccctattctcgttattttttatttcttttggtacgccgactaacatctaaatcactctcctcgttataggtataatagactataaaagattttctacacccccatgctaacacaatgtacctaagttgtaaaaaattaactaacggaaattcaaacaaaagatttagtaaaattagacgaaatatttgcttcacaataatttatttcttattttatggttcttttaggaaaaagagggtaaaatataagtatagaaaatacatatattttgattggaggaattattatgttacaacaatacgaaagagttttagttgcagttgatggatccaaagaagcagaaagagctttccaaaaagcaattcaagtggctaaccgtaatgacgcggcgcttggtcttgtacatgttattgatacacgcgcgttttcatctgtagccaattacgatacaagcatggcggataaagctaccgaatatgcagacgaattacttagtggctataaagaagatgctttaaaagctggtgtaacaaaagtagaaagctacatcgaatacggttcaccaaaaacagccattacaaaagaagcagcaaaagcattccaagcagatttaatcatgtgtggtgcgacaggccttaacgctgtggaacggttattaattggtagcgtgtctgaatacattattcgtcactccccttgcgatgttcttgtagttcgtaatgaagttcctgattataaagatgaaaaataatgatagaaaaaaggctagctctttattaagagctagccttttttattgtttttagcgattatttttaattgtttctacatcacgagcaatcattaattcttcgtttgtaggaatgatgataacttttactggggaatgtgggtagttaaggaatctttcttctccgcgcacttggttaagtgctggatcccagtatacgcccatgaattcaagtccacgaagtactttttcacggatgtatgaactattttcaccgataccagctgtgaagataatggcatctacaccgttcatgcgagctgcataagaaccaatgtatttatggatacggtcaacgaaaacttgaagtgcaagttccgcgcggtcgtttccttttgctgcttcatcttctaaatcacgaaggtcgcttgaaataccagatacgccaagcataccagattctttgtttaacacatcaagtacttgttctgcagttttaccagttttttccatgatgaaaggaataagcgcagggtcaatgttaccagaacgagttcccatagaaacaccagctagtggtgtgaatcccatggaagtgtccattgattttccgccttcgattgcagcgatactagcaccattaccaaggtgacaagttagtaaacgtaattcttctacaggacgtcctaaaagttctgcagcgcgttcggatacatatttgtgacttgtaccgtggaaaccgtatttacggataccatagtcttcataatagctgtatggcaggctgtaaagataacttgctggaggcattgtttgatggaaagctgtatcgaaaacagccactgaaacaacgtctggtaaaatcttgcggaatgctttaataccagtaacgttcgctgggttatgaagcggtgcaagttcagatagagcttcaatatctttaattacttggtcatcaatataaacggattcagggaatctttctccaccgtgaacaacgcggtgaccaattccagtgatttcatcgtaagaaccgataactttgtggttaattaatttttcaagtagcatttgaacagcaatttcatggtcaggaatatcaataatttctttgattttttctccgtctacagtaattgtaaaaatagaatctttcaaaccaattctttctacaatccctgctgtgataacacgttcagatggcatatcatataattggaatttcagtgaagaacttccggcgttaattgcaatcgttttttccattttgtttttgtcaattccttccattattgtttactcttgaaccagttctcaatttcagctaaaatcggtgcagttacgctcggatctgttagcgaagagagattggccagtaaaacttcttttggcggctttacatttacatccgcttttcgtaaaatcaagatgctttttcgtgcttgttcagacttaaacagtgtttcaggcaatttaataattccctcaatatgaccgtttttcttgataaacttgtccaccttagcaaagtcactagtcccaaacattgcgtcaggtaccaagaagaacaaatatcctcctggctttgtgtagcgcattccttgttctataaacaagaaatgagcaaatgaatgcccttcttcacggcaaagttcaaatgtttttgcattttcgtcatccggatagtacccaacaggcaaatcactaattacaacatctacaggatctactaataaattagccagaccatcttgatgtagcaacgtcattttttgtcgctgtaaatccgctcctactaatgcaagcgaaataagcaaatcatctacatctacaccactcgcatgaacgtctacatcgccttttaactcaagttgattaatcaccgtcgttaaaaggtttgcagttccacaggctggatccaaaatagaaatatttttcttcttttgaatcactttctcaagtaaatatgccacaataaaaccaatagaatctggtgtcatttggtggttcacttgaataccatgtttcatgccttttagtagtgctaattgaagacctttgcggatttcttcatttgagaaattttcgagttcgatactttcgtaagactcttgtaatttcaattgtttctcagaagacaactcttctttttgtaaaacttctttttgaaacagattttctcctgtttcataaaccgcttccaaatagcttatttcaagttcattttgcaagataatagctgtattatcaagcacttgaaataattcttgcgttgcttcatttgccaaaagtaacacctcgaattttcatcattactaacaccaccaaacattatacagtatttctaaagaatgtgaaaggattttatgtagtaaaagatgaaattctcattggaaatagttaattataattagtacagtttatttttagtagtaatacagaaaaaagccctcctaattaaaggaaggcttttaagatttaggcttttttcgcagcttcaatcgcagcttcgtaattcggatgatcgctgccttctggaactacttcggtgtagacaatttctcctactgcatttacaacgaaaacagaacgcgctagtaagcgaagttctttcataataacaccatatgcttctccaaaagaaagatcgcggtggtcagataaagtaatcgcatttggtaaaccttctgctgcacaccatttcttttgagcaaatggtaaatcaacagaaatagttaagacaaccgtattatctaaattgcttgcttcttcattaaatttacgcgtttgtgtggaacaaacacttgtatcaatggaaggaacaacgctgataagtctcactttcccgtcataatcgtgcaatgttacttcttctaaatctctattaactacagtgaagtttggtgctttgtcgcctacttttctttcagtacctacaagtgtaactggattatgtttaaatgttacttgagtcattttattcttcctcctttaatggacgcttctattccattttaaagaagaagtaaacgataagctatttttttgctccatttgcccatttttcatctagttctaaataacccatgtggacgacagaagtagattcaaagaagtcggcaatgccttgtttgtttggtgtaaaagcacaaacgacgtataacggccaaatggtttttaatacaaaacgcattgcaccttcccggaataaaacggttaaccaagttaatttttcaccatctagtttgactacacgaagcccgaacaacattttcccaagtgtttgcccgaaaaatcttgtaagtaaaataaagtaagctagaaagataatcgttgttatgctccaataaaatgtgaagaaaccgtcgtccatccccatcccagaaacacggaaaatagggttaacgataattcctttcaaggctgcgatagcaactaaatcaactaaataagctaaaaatcggatccaaaatccagcaaaatactgtttaggaatagcttcttctttcggaatagatggttcataatgatagacttggcgtttactttcaaaagtaacattttcattagccatgtgcgcctctcctctcacattattctccatataaatacatcattcttggcgctttaagtgtaccagttaatttaattagttgagaaatatccgcattttgaccggaaattttttgtgcagctacagagaatagtgagctaaaatctcccggtgcatcatattggataactgttgcaccagctaagccttgttcttttttcaaagcttctagggcatcttcttgataaccaaattcatcaatcaatccgttctcttttgcttggcggccgtcgtatatgcgaccatctgcaattttacgcacttgttctacagtcattccacggccctgtgcaactactttaacgaactcattataagaatcatcaatcattgactgcataatcttcttctcgtcttccgtcattggtcttgtcccgctcataatgtctttgtattcgccacttttaatggtattatctgaaacacctaattttttcatgagttcactgtagtcatacccttgcataatgacgccaagcgaaccagtcaatgtttctttacttgcaaaaattttatcggcgggcgcggaaatgtaatatccacctgatgctgccatactccccatggaaacatagaacggaatattacgttctttttgaatttgtaaaattttgtcgcgaatttgtgcggattccatgactccgccacctggtgaattaacatacaaaagtacaccttgaatattgtcatcatttctaacttgctctaattgttgcataaaaaaagaatgattgtagccagcctcactaaataaggaacctgaatctcccgtatcttgaatagtaccatctacagataatacagcaattgtatcattcccgccttcttcaattactgtttcggttagttcgccggtatctgcgaatagactttcgacaaatgtcggactactctcttcctttgaagcgatttgacttgatgtaaactttgctaacgcactgactatcaaaagtgcaaaaacaatccctagtgcaatccatcttttagcgttcatttatttctcccctttttctgattagataatgtaataataacagcctcttttattttgtacaatctttctcttaaattgtgtcccatttcacttttttacttatgaagaaagaaattgctcttaagtcatgttataataagtttgttgattaaaattggattctggagggacaactaacatggcaaaaactattttttatttttcctatcgaaaaacagaagaactacatgcaaaagcaaaagaattgaagaaaattacgactgattatggatatgaattaactgatgactatcaaaaagcaaacgttattatcagcattggtggtgatggtgcttttcttaaatctgtaagagaaactggcttccgtcaagattgtttatatgcagggattgcgctaacagagcaattaggtcaatactgtgacttccatattaatcaattggatgaaatcatcaaggcagccattgaagatcgttggttagtacgtcgttacccaactatttatggaacagtgaataataccaaagcattttatgtactaaatgaatttaacattcgttcttctatcattagaacgcttacgatggatctttatattaatgattctcacttcgaaactttccgcggcgatggaatggttatttccacaccaacaggaagtactgcttataataaatcagtgaatggttccatcgtggatccacttcttccatctatgcaagtaagtgaattggcttctattaacaataataaattccgtacgcttggctcttcgttcattcttagtccaaaacgcaaactacgtattgaaattgcgtctgaagaaggaaataacgaattcccaatgattggaatggacagcgaagcacttagtatccaacatgtccatgaagttaatttagaagtaggcgatcgttttatcaatattatcaaactgcctaaaaattctttctgggataaagtgaaacgtaatttcttataaaaaaaagtctggcaaatatgccagactttttttattttgcttctagaatagctgctaataacgctttttgcgcatgaagcctatttcccgcttgttgataaataaccgaatggataccatctataatttcagtggttacttcttcttcccgatgtgctggtaaacaatgtaagaagtggtaatcaggcttggcaccactaactaattctgcatttacttgatatttttcgccaaaatccgccaaacgtttcgcattttcatcttcttgtcccatacttgtccaaacatccgtataaataaagtccgcatctgtcaccgcaagtttcgaatcttccgtaacgaaaatcttgccaccactttgcttcgccagattttctgcctttgctagaattgtttcgtcgacctcatacccttttggcatcgcaaggcggatatctatcccgaccatagcaccggctaaaagtaatgaatggcatacattattgccgtcgccgatataggctagtttgataccttccagctgatctttccattcataaatagtcattaaatccgctaacgcctgacatggatgatgtaagtcagttaagccattaataattggaatttctgcatgatacgccaattcttctactttttcatgactaaatgttcggatcataatcgcatcgatgtattctgacattacatgcgccgtgtctttaatcggctcaccacgcccaatttgtaattcctttgaactcatcacaatcgcttgcccacctaattgcagaatccccgcttcaaaagaaacccgcgttctagtagaaggcttatcaaatatcattcctaaaattttcccgcttaaaatatgactataatgagctgggttcgttttcatcgcaacagccaatttaataatatccgtcaattcttctttattccattcaagcaaactgagcatatctttcccagatgtattattttttgcatacattgtcatccctcttcactcccaatcaattggttttccaaaacgcttttcaataaatatatggcttgatcgatttctgcataactgacggttaaaggtggtaagattcgtagcacattcgttccagcagttagtattaacaatcctttatctctaagttccgttataactggttctgcggcattttcaagttctatacctatcagaaaccctccgccacgaatgtcagaaacattatccaacacctctaaattcgcttctaacaaatttctaaaatagtctgctttggcatttacttcttctaaaaatcccgtttgtttcattgtcagtaatatctctttagccgccgcaagtgccaatttatttcctccaaaagtagagccatgacttcccggcccaaaagcgctaattaagtccgattttccgaccatcgctccaatcggcaagccatttccaagcccttttgctaaagtgaaaatatctggatctaaaccaatctgctcaaatccataaagcgtccccgttcgcccaagcccagtctgcacttcatcaataattaataatgcccccatttttttgcaaagtaattgaacttctaaaagaaaggccgcattcgctggaatgacgccaccttcagcttgaattacctccaacataacggctgctgtattttcatcgatttctgctcgaaaagcttcgatatcattataaggaacgtaggtaaatccgggaacaagctcaccgaaaccctgatggattttagcttggcccgtagctgacattgaaccgaatgttcgtccgtggaaagatttttcaaaggtaattattttttctttcccggtatattttctagctaatttgagcgccgcttcatttgactctgtcccgctattacaaaagaaaactaatctctctttaccatcagcaattaattctgcgacactatcttgcaaagcacattcatataaattcgatgtgtgccaaatattccctaattgttgttgtactgcttctgcaacatttgttgggcaatgacctaggttacaaactgcgataccgctagtgaaatcgagatatgttttaccatttttatctgttacaacagtgcccgtaccgttaactaaatcaataggaaaccttttgtatgttggaaaaacatgtttcatccaatcgccaccttgttttttatttttgttccgctattgttaagggaatctgtaataataacttgtccgacaccgttttcggcagcaaaggcagcgcttgctaatttaggaatcattccaccttttattacgccagtactttgtagcttttctatttcagctgtggctatttcgccaataatttctgaaccatttttcacaccaggtacatctgttagtaaatagagcgcttctgcatggagtgcgcttgctacctcacaggcagctgtatccgcattaacattgagccaatcgtgttcactatttataccaaggggcgcaatcacggtgataatattttcgctaagtaattgttcaattaaatttgtttttacttttgtgattttaccaaccaaacctaaatcggtgtcacttaacctatctgcttccagtaaacctgtatcactagcgtttaagccaatgaccgagatatttcgtttttgaaaagcagtcgtaatagctggttgtacttggccaattaaaaccatctttgtcacttcgagagtcgctttgttggtgacacgtagaccattcttcgtttcgaccggaatagcaagagcttccatcatttttgtaatataatgaccgccaccatgaacgaggacaattttcttattcgccgcttgccactctgtaatttgtcgaaaaaaaccttctgttagattgtcgcttgcaacaccgccgagttttataactatcgtgttttccacccttattcctccttacgtccggtaacaagcattgattttgacgtattcataactcaagtcgcatccccatgccgttcctgactcaagtccgatatgaagatcaacttcgataatgatatgctcttcttctaaataagcatctaacgcttgttgattataaatggtttggctactatgattcaaaatttcaatcccgccaattttaatcgtaatgttatctggtgcaaatcggccaccagaataaccaattgcgcaaataatacgtccccagtttccatctccgccaaaagccgccgtcttcacaagactagaagaaacaatttttttagctatcattcttgcatcttctgtttttgtagcgccatttacttgtacctcgattagttttgtcgctccttcaccatctcgcgcgatacttttagcaaggtgttccgtaacagcttgaaacatatcagcaaatttcgcaaaatctgctgtcccttcttgaagcatcgggttttccgcgcacccattcgccatgactaccaccatatcgtttgtagaagtatcaccgtccaccgttatttgattgaaagttttgtctacttttatttttagtaatttttgcaatagttcagccggaatggcagcatctgttgtaataaaagcaagcattgttgccatatttggatgaatcattcctgatcccttcgctacacccgacatcgttacctttctaccaccaatttctgtttgaaaactgatttgtttttgaaatgtatccgtcgttaaaatcgcttcttcaaaatcggccgcatttccggtttgcttttctagcatctcgattcccgcgttgattttgtccatcggtagcatatcgccaataatacccgttgaagcaacggctacggaatcaagtggaatttctaacttttctgccgtttgagcccgcatcgcaagtgcatctagcatcccttgattccctgtgcatgcattggcattcccgctattcacaataatcgcctgtaacttcgcattactttgaaaagaatctttcgttacaaaaattggtgcggcttgcatttgattcatcgtataaacagcagctgcatttgctggaacctctgaataaatccaaccaatatcatttcgttttctctttagtcccgcgtgctttccatccgcataaaatccttttggtgaggcgatatttccttttataagttccattttatttttcccctttcacggatacaccggaataaaccttaatccgtcactttcagcaaaattcgccattatgtttaaattttgaatggcctgaccagccgcccctttgactaaattatcaatcacagaaacgatagtaatcacattcgttttttcgttataagcaagacctatatcgcagtaatttgaggctgtcacttgtttgacagttggatatacattctctggttggattcggacaaatggagcattatcgtaggtggattcgtaaagcttatgtaactctttttgggtgataggatttttgggtttaacgtagatggttgtgaagattcctcttgtgatgggaattaatgaagtagaaaattgaattgctgggatactttcatcccatttagttaattgctgcataatttctggaatatgttgatgggaattcattttataaagcgtcatgttttcattggtttctgtgaaatgtgtacttgctgagggcacttttcctgcgccggaaatacctgatttagcgtctacaataatagatgtgggatcaatcaacttattcgttgcaagtggtgcgagacctagcaatgttgcagttgcataacacccaggattcgcaatgaaagtagtttctttcttttcacggaattctgctaaaccatattccgccttaccgatatactcggttggcgccgcgctttttccgtaccacttttcgtaaagttgcctgtcttttaatcgaaagtccccggataaatcaatgacattcaaacccgcatctacatatggcagtgcaatatctttcgcgattccagaaggcgtcgcgataaaaaccgtgtcacttttttcgatgatttctgttggatttattttctctaaggggctaactgctaaatcttttaaatgtggataaaaagttgctaacgtttctgcttgagcggaaaaactatgtaacgtcgctatgtctaccgaagagtgttgatgaagcaagcgaattagctcaagtcctccataccccgtcgcgccaatgattgaaactttcatcctaacccctccccgttaattattaaatgatacttttcattataatgatgtatatttataatgtcaaatggttttttattaatatttaaaactattttatgcattttaagttatttattatgtatataatatacaaaaaaccgtttatccttttctaggataaacggttaatcttaaaataaatcagcgaactcatctttcacttgcgcagtttccgctacatttacagaaatggtttcgatgttatctaaagcttttgcaattagcgcatcgaaatctgtgaagctttcgtaatgctcgattttatctagttttggttttgtttttggagatggtggcgtgaaaatggtacagcaatcttcaaatggttgtactgataagttatacgtatcaatcttttgtgcgatttgaataatttcatttttatccatggatacgactggacgaatgattggtgtcgctgttacagcattaattgctagcatactttccaacgtttggcttgcaacttgccccaagctttcgccattcacaatcgctaaaccatttctcttgcgacgaagttcatccgtaattcggagcatcattcgacgagttacagtcataatcacactttcaggaatttgttgtttgataacttcttgaatctctgtgaacgggacaatatgcatttgtacttgtccactgtatttagccaattttgcagctagatcaatcgctttttgtttcgcttgttcacttgtatacggtgggctgtggaaatgaactgcttcaatttctacgccacgtttttgggctaaatagccggcaacgggactatcaatacctccagaaagcattaacattgcacgacctgatgatcctaccggcagaccagctgcaccaagaattgttcggcatgataaaaatacgccttctttacgcacatcaatggttagttttacatccggatttttaacattgaccgttaaatcttccatattttgtaatacataagcaccgatttcctggttaatttcattagaatcaagtggaaactcgcggtggcttcgtcttgctgcgactttaaatgttccgttctcctcatgcgcatcttgtactaaggcaagtgcagcagcttttacttcctctacatctaaattgacgcgaacagctggactaaaggattggattccgaaaatcggttttaaacgttcttctgcgagctgataatctgctccatttaaaataatatacattcggtcacgttctccatgaatgcgaacttccggcaaatccgtcattgcgcgttttacattctgcgccaacttcgtcacaaattgttttctgttttttccttttgtagataactctccgtatctaattaacatacgatcaaattccaatttatttcaccactttatttagattttcaatgatttcttgcagtttttgaataaaaattttcgcttcggataaacgattttcatacgataagctaacacgtactgctcccgtcgcttcttcgtccgtcacacccatcgcttttaacgtgctgcttgctagtttttgcttagaagaacacgcacttgttgtggaaatgtaaatatcttctttttctaaagcatgtactaaaatttcaccgcgatgcccttttgctgaaaaacatacgatatgcggagccgccacactttgcttcgtatgaactgtcatatcagacatttgcgcaattttcgttagtaagtaatcgcgaatctcaattaacgcttcttttcgtggctcattttctaatgttagtcgtaaagcttttgcaagcgcaacattaccagccaaattttccgttccactgcggtagcccatttcctgcccaccaccaagaatttctggatgtaaatgaacattttttcgtttgaaaagtatccctgtgccgcgtagagcatgaaatttatgccctgaaaaagtgagcaaatcaatactattcgcatcaagagtaagcggaatttttccaatagcttgaacaaaatccacatgaaagaaagtattttcaagtacgcttagcatttcgccaatttcttgcaacggctggatacttcccacctcattattcacacccataatagatactaaaatcgtttcatctgtgagtgcagcttttaactcctctagcttgatgacaccgtttttatctactggtaaatacttgactgtaaaaccttcttgctcaagttcttccattactacgcgaacagaaggatgctcaatgctagaagtaataatatgtttcccacgattttggtaactataaacaagccctttaatcgccaaattattcccctctgtgccaccagatgtaaaaatgatttcttctggcaaagcactcatcatcgcagcgatttgttttcttgatgcatcaagcagctctttcgatttagcaccaaaacgatgaagcgaagaaggattagcaaaataattactcgctacctttgtatatgtttcaagtacggccgcatttggctttgttgtcgcactattatcgaaataaatcataaaaccaacattctcctcccaatattccactctccattttatcataattccaatactttccaactactattttcataaaaaaacaggattcctattataataatagaaatacctgtttttacgtttttattcaatatcgtcgacgcttacttttgattcataagctttttcgacttttttaaatgcgcctgtttccactttttcaagtgcggttacagcaatttctaatgcttttttatactgataatcgttgtagaaatggttttctgcttgtacgagttcatctgcaagttctttgttacgcaaacgatagcggttagcatattggataacatgctcaactaagcgaacattctccatcatttcctcggctttttcagttaaatgagttaaatcttcttctgcaatacgccaatcttggctcactgctttcatatttagcggtttttcttctaaacgtttctcaagcgcatcaatggattcacccatatgttctcgtagtgataaatactcttctggaagacctggtaaacgctctcgttccattttgcgatctagtgtaataattgcacgacgcatccgttcagcatcatcacgcgcctctagttcatctttacgcaaggaacgcaattcttcagcgaatttgtcctgctcagtgctaatcgtaataagtgctgcatcaatttccttcaatgtatcttgcgctgccgagtatgcaatctcaccactagcaattagagcagttaattgttcaaagttttcttttgcttcactcaatttagcgctcgtttttaaataaaccgctagatcatcttcagcaacatgataggtttgttttacttctgtaatttgttcagcaagtgcatctgaaactgcattttggcgttgtaatttgtcagaagttgggctatgattttctttcacgaaatgacgagcttctgcttcgtgttcaagcgtatcataaaacaaatcgatttcattatgtaattcttctactccttgttccgcttcatctaaatcaagattaattacattttttttcattttatcaatttgatttttcatgcgagaaatttctttatctaactccatttgagctaaataataaccttttctcaccatttcttcataaccggcgcgaagtttagtcatttcttctggcaaaatggtatctgtttcatgcagtaatgacgggattcgctccatttgcgcttcgattacttgcatttctttttgaaccactataacgatttctcgtgcctctaaatgatcaccttggtcagttaatgaatcatagctatttaagctttctgacagttcacttagttttgtctcaatatatggtaatgtttctccaagtttaaatccccttgtcaaaacttctcggcgcaactccgcaaatttttctttcgtggcacgactttctttggcatttttttcttcactaataagtagctcttttagtccaccaagaatttgatccatttgcttttcaattacaacgagcatttgctcaatatcattttcagcgtgtgtagcagaacggaacttgtaacggtccgtgttcatctctgcttctaataatacttcttctaaatcaggaaataatctagtttcaatttcatcccaggacgaacgccatgattcaaaaagcgcttctgtctgacctgttagttttaattttttcacttttgaaagttcatcaataaccggccgctctctgagtttaatctttttctcttctaactcgtttattctttggtaatgttttctttttaatatgtagcctgcaccaatgactgcaataactacgataataaagccgattaacatgtagtacatccaaaatcctcccatcaacgttaacttgtgaaagaaaaacagccacactcgtgctgctcatacatcttttcaattatgtacatctttccatatgtagtatattttattcctcattttcagttcattatacacatcttttattttaccacgatttgcctagaattacttgcgtttagcgaaaaaaattttgaagcaagtaaaatctattctattacaaaacaaatttcccgaaatcccttgtcgttcatgctatactaaagacattatttgaaaagaaatgtggggataaaaaatgatcgaaatcaaaaaaatgaccggaacaaaagaagaaaattatgcacttgccttaaaacaagtacaagcaatgattcacggcgaaccaaatctaattgcgaatctaagtaatgtttcttctataataaatcaagcactttctgatattaattgggttggattttatttacttgaaaaagaaacaaatcaattagtactcggccccttccaaggtttgcctgcgtgcattcgcattccactaggtaaaggtgtgtgcggttctgctgcctcagatcaaaaaacatatatagtagaaaatgtgcacgatttccctggtcatatcgcctgtgatgcggcctctaactcggaaatcgttctacccattgtaaaaaataatcagttgcttggtgtgcttgatattgatagtcctctttttaatcgttttaatgaagtggaccagttgtggctagaaaaaattcgtgatgcaatcgttcaagaaatcaattgacaagctactactaactatactatactggaagatgtgtaaaatgcagcttgagtaaaatgaatgagtgtgttgtttacccccagatttaattctgtggtatatcgcgtaaccggcggctgctatggtgatggtatatgaaggtaaactgccctgatttggttttacgtcacgtttgttttataccaaaaacaaataaaaggaggagtctcttatggctcgttatacaggtccaagctggaaagtttcccgtcgtttaggaatttcactttctggaacaggtaaagaattagagcgtcgtccgtatgctccaggtcaacacggcccaactcaacgtaagaaaatctcagaatatggtttgcaacaagctgaaaagcaaaaattgcgtcatatgtatggattaactgaacgtcaattcaaaaacacgttcaacaaagctggtaaattacgaggtaaacatggtgagaactttatgatcttactagaacaacgccttgataacatcgtttaccgtcttggacttgctcgcactcgtcgtgcagctcgtcaactagtaaaccatggccacatcactgtagatggcaaacgcgtagatatcccttcttaccaagtatctgttggtcaagtgatctctgttcgtgaaaaatctgctaaaaactctgcaatcgctgaaagcttagaagtttcaagcttcgtgcctgaatacgtaactttcgatgcagaaaaactaactggttctcttaaccgtctaccagaacgttctgaacttgctgctgaaatcaacgaagcatttatcgtagaattctacagccgttaattagagctaaaaaccttacaatacataacttcggttgtggttgtaaggtttttttatgcataaaaaagcactcgtctaaaaaatattgaatagaactataaccaaatttctgttatgaacagaagagtactgttgtttaatatgcattcaatacttttttctatattcatcctcatatttggccaattaaaatacgcctctaaagttagattaaaaatctagatttagaggcgtactaaaaattgggtgttctttctcgtattatcaattacgctttagtttgtactacgacgctttagcaacttcactaacaaaataataataagtataggcgcgagtacaattatagtttgcactgcacctaatagcagagctccaataatagttgatatattcacatcactaattagcataatatccataaagctaagcattataaaaagtaacatagctacaattaaaatagtttttttcattaatttgtccttcctctcctacgcacttatcgaactacagatgacttactcaccttgcccaaatgattacattccagatttactcgaatatatttctcctccactacaagtccatttcctttatatgttaagcccgatttagcggtagcttgttgatatactacccttttcttgatactcggtttttgtacaccattttttttattatgcaccgaccaaacaacaccagaaataccattcactttaacatagttctctgtagtttgtgcagtcaccttagcaccattataagtgaacttggcgccaataccagcagtgaacagtttattacctgaaaccttagcatacacagtacgtgtatgtcgagcagatactgtttttgacgcagcagcatatactttctgaccaaacaaaactgtttcaccaaactctttaatacttgaaataatagattcatttgaatcttcttctcttaataacttttcctcttctgaagtcgcttcgttctcatttgacatttcagttgtgtctagcataacttctgtatcagtaaaaatcaattgtgtttcatcattgataatatatgtatcaataaattctgttgaatcctcagaattacctatcttattagcaatagcattatcattatcggctaaatactccttaacaatcttttcctcattatcatccgcatttctcagtttctcaactagctgtttctgatatgctaactcttcctttatttcttttttagtaagattcaactcaccaccaccggcagacactgttacaggtacatcaatcacttctgcttcgactactataggtgatatactatggctaataccatagccccgatagcaactttttaaatttaatcttgttcataataccatctccctttttattatattatttatatacctcttatattacattaatgacaaaaaagttacaagacgtttaaataaaattgttaagttaattagaactaaaaaccttacaattcatgacttcggttgtggttgtaaggtttttttatgcacaaaaaaagcactcgcctttaaaaacgagtgcttttcttcttatttataagaaactaagaagtattttttcttcccgcgtcttacaatcgtaaatttattttcaatccggtcacttgcatccatgattttttccaaatcttgctgacgttcgccgttaatgtaaatagccccgttgcctacatcttcacgcgcttgacgtttggaaggttcgataccaagtgttactaaccaatcgaccaagttcgcttctgaatcttctgcaacaaatgtcggaacgtctttgaatccttgttcaatttcatccgccgtaagtgcttttacatcaccactaaatagtgcttttgaaattttcaaagcttgttctaaagcttcttcactatgcacaaatttggtcatttctgctgctaatgttttttgcgcagctcgtaaatgcggttctgtttcaacttgtttcgctaactcatcaatttctgcttctgttaggaatgtaaagtacttcaaatattttacaacatcacgatcatctgtgttaatccagaattgataaaactcatatggcgttgttttttctggatttaaccaaattgccccgccttctgatttcccaaatttcgttccatcagcttttgttaaaagaggaattgttaaaccgaaagctttggcattttcgccttgttttttacgaatcaaatcaagtccagcagtaatattcccccactggtcactaccaccaatttgcaaacggcaatcattaaattcatataagtgattaaagtccatcgcttgtaaaatttggtaagcgaactccgtgaatgaaatccctacttctaaacgactagcaacgatatcttttgaaagcatcgtattcacgttgaattcttttccatagtcacgcaagaaatcaaggatactcacatcttttgtccaatcatagttgttcaccatgctcgctgcagaattaccttcaaaatcaaaaatctttccaagttgcacgcgcaaactttccacatttttactaatttgttccattgattgtaacttccgctcttcctttttaccactcgggtcaccaatagttcctgtcgctccaccaactaaaataatcggacggtgcccagcgttttggaaacggcgtaaaatcataaatggaattaaatgaccgatatgcatcgagtctccagatggatcaatcccgcagtacaaagaaatctgtttttcttctacccatttgcgtaatccttcttcatctgtttgctggtaaatagctccgcgccactctaattcatcaataatattcattttcatcattctccttttatttttggacataaaaaacgcccctccgctaaacagtttagcgaagggacgtattaattaacgtggtaccaccctacttttaggaataaatcctacttcaaaaaataacggctcaacaccggctgcgccattatcctgcgcagcgtgactccgggatgtaattcgtctacttacctctactagtttccaccaaccactagctctctaggaataagaataagcaactacttcgtccgttcatagtcattttcgttatgaaaagtatacatacatttataacataccgttaaaaatgctgtcaacttattttttttctttagtcgtaccacgtagtttttcactatgtggtaagataactgttttttcatctacttcttcactcgtcatcaattttgttagtagacgcatagccacggcgccgatatcgtataaaggttgtacgattgtcgaaagttgcgggcgtgacattaatgttaatttcgtattgttgcttgtcattacttctaagtcttctgggactttgattccagcatcaagcgcggcattcaaaataccaatagctagttcatcatctgcaactaccactgcatttggttttttagacaaggcacttaattctgcccaaacttttacacctgcattgtagttatatttcgcttcaataatgtagtcttcttgataagaaattccagcttcttctaatgcttctttgtaaccagctaatttcatttcgcgattgaccggctcgtttagagaaccacttacaaaagcgatttgcttatgaccattatctacaaaacgtttcactgcctcttttgttgcttgtttgtaatcaatgtttacagaagcaaatttgttttccatatcaacggctcctgctaaaactactggtgctggagaacggtcaaattcttcttgtaattgttctgaaatacgttcgcccatataaataattccgtccacttgtttaccaagaagggtattaagtacttgaagttctttatcctcattttcgtccgaattgctaaggataatgttgtatttatacattgtcgcaatatcttcaatcccacgagcaagttcagcataaaacacgttagaaatatctggaataatgacaccaactgtagttgtacgcttgctcgctagacctctagctacagcattaggacgataccctaattgattaataacatctaatactttttttcttgttactggtttaacattcggattgccattcactacccgagataccgttgccatagaaacgttcgcttcccgtgcaacatcataaattgttacattcatctctattcactctccatattcattatttaatggctctacctaccattgtaaacgtaaacaaactagccttcctttaataatacgacaacttttttcgatatgcaattgtttttactctttattttcatttattttcatatcaaaacggcattattacccgtaattaaatgccgatagaatatggattgttaatagcaaaacaaaaaaccttggaatcccaaggtttttcgatgttactttattttatgtggtactaagttacttgctaaaattgcattccagaattcttcaaattcaggaatatccatttgttgtgcagaatccgataatgcaactgcagggtctggatgaacttcagccattacaccgtctgcttcgatagctagagcagctttcgcacatggaagtaataaatcttttcggccagtagaatgcgtcacgtcaaccataactggtaaatgggtttcttttttcaaaattggaacggcagaaatatcaagtgtatttcttgtcgctttttcatatgtgcggataccacgttcgcataagatgattttgccatttccttgtgacatgatatattcagcagcaccaatgaattcttcaatcgtagcagataaaccacgttttagtaagattggtttgtccacacggccagctgcttttagtaattcgaagttttgcatgtttcttgcgccaatttgaataacatctacataatcaagtgcaacttcaatatcagccggcgtaacgatttcactaataacacctaaaccgtattcatcagatacacgttttaaaattttcagtccttctaaacctaatccttggaagtcatatgggctagtacgaggtttaaatgcgccaccacgaataagttttaagcctttcgctttaatggattcagcaaccgcagcaacttgttcataagattccactgaacatggaccgaaaacaaatactggttcgccattcccaattggcaagccttttactgtaactatcgtatcttcttttttattttttctagaaacgagtaatgctttagagtgatcttcttcttgaagctctaatcccgctttaaaaatttctttaaataatttttgaaccgtactatcttcaaaaggtccttcatttgctgcaagaatcgtgttaagcatttctctttcacgtaatggatcaaaacgaagagaaccttgagttcctttaattttgccaatttcttgtaccaaattagcacgtttgctaattaattctagcaaatcaatatttaattgatccacctgtgttctaagttcctctaaatttgtattaaccatttaacttccacccttctaaaaatctgctccaagattatttctcattatagaggaaaacagataatttgtcacgaatccacttttatacttaatcgcttttaagcattaaagtgaataatgtaaaactaatattaacatgttttaaatcaaattacaagcagataatgtgtttttctccaataaaaaaacagccccgtaaggctgttttttttaacttagtttattttacttctttttttacgtcagaagcaatttttttcgcttcgtctttgccttcatctactgctttttttgcttcttttttcgctttgtccgctgctttttctacatcgtctgcagcgtcttttgcttcatttttcacagcatctgccgcttttttagcagcttcttgattttcttctttgttttgtgaaacaacttctttcacggctttactttgtttagaaacggtatcagctaatttgcctgatttgtcttttactacatctacaaatccaccagcagaatcaactaatttatcttttgttcctttggctacaccactgatttcgatacctttttcataagcaacatctttccattggttgcctttttctttaattgtatctacttgtgtatttaagtcctcacgtagttctttacctgatttaggggcaaatagaagtgctgcggctgaaccaacgattgcaccaattaaaccaccgattagaaaatcttttgtattaataccatctttttctgccatgttaaatccctccaaattatattagaaattagattgttctgctgcttcttttgctgcttctttcgctgctttatttgccttcatcttttctctaaaagaaagaattgaattgctaattgagacagcttgagaaatcttcgcttcgttttgctctactttgtttgttgcgagtgttgctagttcgcgaacagattgacttaatcctagtaaagaagtcccaatgtcaccaactgcatcaaaaactggatccactttcgcaactttgccatttacatcttctagaagtgtattggtcttatcaagcaatttttgtgattgtcctgtaatcccttgtacttctactgttattttttctaacgatttagctacctcatccattgtttgggaagttgattttaacgtttttcccaagtagatggcaataactaaaagcgcaattgcggcaataagcgctgcaatatacaagattactatcatctatccacacctccatattcctttttctataccctgagtattcccctctaaaactttcttctctaatgatctatgtacaaaatacaaaaaagaaaaggtattagcttcattttagcaagtaactgccgaaaaataaactaataagaaagaaaccggttaatttgttgtagaaggttgcttttggcgtaatttggagtaaaatagatacaggctgctttttgcctatttttagttaaaatttagggaggttacaatatgagagatgcaagaatcgaaaaattagcacataatttgattaactattccgtcaaacttggcgctggggaaaaagtattaattgaaaacttcggtgttcaaaaagaattagtgatggctttagtggaagaagcttacaaagctggtggtttcccgttcgtttccttaaaagaaccacaaattgaccgcgcgatgatgctcggagctgatagttctcaatatgcaaaaattgctgaattcgaaggcaacgtaatgaaagaaatggatgcttacataggtttacgtgctggcgataatatcaatgaaacatctgatgttccagcagataaattgaaaatccacggagaaacagttggcaaaatgcactctgatattcgtgtaaaacaaacgaaatgggttgtacttcgctatccaagttcctccatggcgcaacttgccaaaatgagcactgctggttttgaagatttctactttgacgtatgtaacttagattacggtaaaatgagtgacgcaatggacggcttggtagaactaatgaataaaacagataaagtacacttagttgggccaggaactgatttaacctttagtattaaagatattccagcaattaaatgtgctggcgaaatgaatattccagacggtgaagtatttactgcgccagttcgtgattctatcaacggaacacttacttacaacacaccttccccttatcaaggctttacgtttgaaaatgtatctttcacatttaaggatggaaaaattatcgaagcaactgcgaatgatacagctcgtattaacaaagtcttagacacagatgaaggcgcgcgcttcgttggtgaattcgctattggggttaacccgttcatccacgaaccaatgcaggatattctgtttgacgaaaaaattgaaggtagtttccactttacgcctggtcaatgttatgacgaagcatttaatggcaaccaatctgctattcactgggatttagttaacattcaacgtgccgattacggcggtggcgaaatttactttgatgatgttctcattcgtaaagatggtattttcgttcttccagaattagaagcacttaatccagaaaacttagtataaaaaaaggcgcttaggacagaatcctgagcgcttttttatttaaacaattgttttttcaccgggttgccagttaatcgggcatagtccaccagtttgaagagcttgtaaaactcttaaaacttcatccacttcacggccaatattattatggtgcaccacttcgtactggatttcaccttttggattgataatgaaaagaccgcgcaatgctacgccttcttcctcaattaatacaccataatcactagctacttgatgattcgtatcagcagcaagcgggtagtttaatttaccaataccaccttctttaattggtgtgttcgtccatgcaagatgcgaatgaatcgtatctgtagaagcaccaattatgcgtgcatttaatgcatcaaattcatctgaccgagcggaaatagcaacgatttctgtcggacaaacaaatgtaaagtccattggatagaaaaagagaatcgtccatttgtcgtcttctatatttttttctagactcactttaccaaaagtctgatttggcataactgcttccatttcaaatcttggagcttgtgtgcctactaaacgttctgccacttttatccctccattaattatgtagttgtattttgtatcacatgatatattttaatacactgaagaaatactgtaaagctttatttatactaattataaacaagaaaagagcatgccctgaattcggcatgctctatttagtcattaattaatcgcactttttttcaagtcagcttctgttaaaaattcatgatcaagcactttttcataagcagcctggaatttttgaacgtctcctgcccccatgaacaaaataacagcttctgggtatttcaagagctcttcagtgtgctcttctttgataatgtggttcccttttgttttgtgcgctaaatcagcaatcgttaaatttcctgttttttctcgcgcggaaccaaagatatcacaaaggtacacttcatctgctaaattcaagctgtccgcaaagccttgtaaaaatgtgcgagttcgcgtgaatgtatgtggctgaaaaacagcaactacttttttgtcaggatatttttgtctagcagcgttcactgtagcacggatttctgatggatgatgcgcataatcatctactaacacttggtttcctttttcggtaatactaaatcttcttttaacaccttcaaaggtttttaattcattttttacatcttctactggtagaccttcataatcgcaaagtgcaattacacttaaggcatttaatacgttatggtccccgtaagctggaatttcaaacgaacttaagaactcctcgcggtgatacacgtcgaattttgttccagttgtttctttgattacatttttagcttggaattcgttttcctcgccaaaaccaaagtaaataatcggtatgtctaaagtaagcttacgtaattcagcatcgtcccctaaggcaaatacagcttttttcacttgtttaccaagtgtttcgaatgcgttaaatacatcatccacgctcttgaaatagtctggatgatcccaatcaatattcgtcataattgcatatgttggtttataagcaaggaaatggcgttgatattcacacgcttcaagcgcaaaatattccgcatcttttgttccgctgcctgtaccgtcaccgattaaataagaggttgggcgaatcgcgccaacgacatgagaaagcaaaccagttgtcgacgttttaccatgagaaccagttattgcaatacttgtatagccatcaattaattgacctaaaaatttatgatatcgaatcaccgaaagcccaagctccagtgcacgctcaatttcttcatgtgtatccgggaaagcattcccagcaataattgttaggccttcttgaatattatcagccgaaaaagtcataatcggaatttgcttttcttctaatgctttttgtgtaaagaaatatttatccacatcgctgccttgcacttgaaaacctttatcatgcaggatttgagcaagtgcactcattcctgacccttttattccaacaaaatgatagatagtcattatttgaacccccattaatttatcttgaagagggtgcctaaaaaaaacatgttaactgttaagcaccaagtcttaactctgaaaacagtataaagtctccgttttctagacatcatcttacgttctaattgtgttttatgtttgaattctagttgagtcaataattcaccagcttattatatcactttccatgtaaatagaaaaatctttcagcgaatataagcgaaattactcatgaaaatagctattatttgtataactaattaagtaacatgttagtttagtactacaaaattaagattctttgtttcgaagcttagctaattggtcctttgtaataatcacatctcgaggtttggagccatttattcctgaaacgatttggtgattttcaagagattccattaaccttgccgctcggttatagccaatcctgaaatgtctttgcaacaaggatgtcgatgccgcattttgacttaaaacaaagtcacatgcttcttcaaataattcatcggtattttcttttgccgtttctttcacaagtaattcttgttcttcaaaaatataatcggcctcgccttggctccgaacatgagcaacaactgcatcaatctcttcgtcactaacaaaggttccttgtaaacgtactggtttacttgcaccacttggtaagaagagcatgtccccttttccaagtagtttttctgccccacttgcatctaagatcgttctagagtcgatttgagacgatacagagaacgaaacacgtgtagggatgttcgccttaatgagacctgtaataacgtctacagatgggcgctgtgtcgctacaatcatatgaataccacaagctcttgctttttgcgcgatgcggctaatggactcttctacatcatttggtgcaaccatcattaaatcagctaattcatcaatcacaattaaaatataaggtaatttctcccctgtatgatctgggtgactagcgtattcattatatttttccatatttctaacaccagtatggctaaataattgataacgacgttccatttcttctaccgcccattttaaagcgaccgtagctgctttggcatccgtaataactggacttacaagatgcggtatccggttgtaaggagctaactcgaccattttcgggtcaatcaaaagtaatttcagttggtctggagttgctttataaagtaagcttactagcaatgaattgatacaaacacttttccctgaccctgtagctccagcgattaaaccgtggggcattttttgtaaatcagtaataatcggtgtacctgaaatatctagcccaagagcagctgtgagtggtgaagcggatgtctgaaaagcttccgtattcatcaattcagaaagcattacgggacgacttgtctgattagggatttcaatacctactgtactcttaccaggtattggtgcctcaatacgtatatctttcgcggctaaatttaatttaatatcatccgtcaaattggtgattttgctgactttaacacctttttcaggttgcacttcaaatcttgttacggcagggccttgggtgcgattaacaacgcttgcctgtacattaaaattttccaaggtctcatctagcatctcttgttgcatttgtagccatgagtcgtcttctcgtttggagactggcggatggagtaaaccaaacgatggaaattcatagttcattggataagaggctgtcgctacttgcgtttgttgaacaatattcgtttgttctgcttctatctcaactggttgttgcacatttatttcctgcgcatcttctttttgaagcgcttgtttatcttttttcaccatcatgacattaaatggaattctgctttttagcaactgttcttgtctatttgattctacttgtttgcttctagtagttgtttttgtttgcgccggttcttccgttataagggaaacgcgtgctggttcttgctgttcaactggttctgggttcacttccacttcaggttgttccgtaacgacttcttccatcactggcactgacacaacctcttcttctatttgacgatttagtccggcatcaaaagcaattgtttccgcttctgctgaatctaacaaatctactggagtaatggttaaatcttcttgtattgtactaagttcttctgcttcagttacagcaaactcaaatttacttggtcgtttattaaaggcataaacaggcgaaggtacatccgtcgccgtaaaaggtcgttttcttgtttcctcttttactggttgcgtctctgccacttgtctttctgttattggttgtttttttggttgaattggttggcttttttgtttatctggaattaatggaaaacgaaattcaccttttggatactggtaaaccatttgcgttttcatttgtcgtttcaccggttgcatatgtttttgttttggagctgttttgtaagcaactggtcgttcgttccttatagtacgttcttttgttttaattgctgtaacatttgatttcggcaatacttctgatgctcgttgttttgctttcttttctacttttcttgaagacgtatcttcgtatgtatctatttcctcgtccatatcgccaaagaaaaaatctttaaaccatcccattcataatcaccctaaatttaattttcttgtttgattttaacagacaaaaacaaaataatctatgacaaaattgtgaattcgccttttttcgagccatattcgttataataccttggtaatagaggggttaaacatggtataagtttttgttataaaggtgaaattgattcatttttgtgcaatttatgtatattttgtatacaattaacacattatagttctacatttaggatgttttcacaatatctaataaatagcaactaaaaaagcgcccgatatagcatcagacgctcaaaactaaacatttatttagaaattaacaggaaaagcttctccgattgtagctgattcttccagaaccataatccccttttccgtaggcgcatcaggaatcgccaactctctcgcagcacaaaccatgccgaaagaatcctcgcctcgcaaattagaaggtttgatgattaaaccactcggcataaccgcaccaattttcgctactactactttttgtccaacatcaatatttggtgcaccgcatacaatttgcaaaactttatcccctacattgattttacatacatttaacttatctgcattaggatgtttttctttcgattcaacataaccaacgacaaatttaggagataaatcagccacaatttctggttcaaatccagctttttcgatcactcgattcattaatgcaaccaattcttccgttagttctactttaccatttgcagtaatatcaaaatattttgagctgttaaaaatattgaagccagctacttcttttgtttctcgatcgaaaattcgcgctacatccccacgacgttcccattcgcgattttcaaatgttacttcaccagtttcaattagtagagtgtcccctacccctttttcattataaaatgcgtttactatcacgtcttctactcctttaatctgttttttgccattataaatatcggttcaagtttaccattattatagacaaatggcaaagaggtaattggtacaagcccatccgcgaaaaagtccatcgtcatatgagccagaacatcgtaccctgtattatcttgaatatccccgataattaagacgtcttgatgcggtacagcaagcaccatttctcccgttaacttctcacgcatttcgcgaagaaatgcttcattcaacaagcgactagcatcatagccatcatttgtacgaacgaaataaaagtcattgccattaacagaatcttttttcagagggatttctagattcgctaaattattaaaagcagcttctcttatttcttcgtgcgttagctgtgcttttttaagcatactctcttcaataaaacgataggatttccccaaatctaccgcgtagaaaattttcgtttcagctgtatgatcatccgttaacagtacttctccagcttttgtttcaccaggaaaagaagttgcacgcacaacaggataaacgttcgctttattattttccagctcaacatttcccgctgctgctcgaaaaccctcttccacataataaacaattttttccaccgctgcatcaccatcattttcatagtttgcgatgatttgcgggatggccagtgttacctttttgccactttgcactaccgttagcgcgtcattgtctcgattatatgaaaattgccgattcggcgcttgcaactctttttcaagtctttctttcatttttaacgtagtcattttagccataagtgcctccccttccataaaaagcagtcactttttatatcgcagctagaaaatcattaatttcttcttttgtttttctgtctttacttacgaaacgtcctacttcttcaccgtcttcaaacgctaaaaagcttggaatgccaaaaatcgctaaatcagcacataaatcaataaattcatctcgatcaacatgataaaaggaaaaatcctcgttttcagcttcgatttcaggcattactggttcgatgaatttgcaatcgccacaccaatcggcactaaacataaaaacggatttgccttctgatttaatagcattaaattgttcaactgattctaagtttttcatttccacacgctccttcttatctcatactagttaaatcctaacgcctaacaacactttcgtccagaataacgctcatgaaaaaagcccagctctagtaaggagctaaactttttaccgaactttcgagcgcgcttttttcttttctaaaaaatcattgaaaaaggtgaaaaatagcgtaataatccccgcaatcaaagtagtccatatccaaccaatctccgaatcacgaaaatacggcatgcttgtagcgtatcctaacaagaacactaagctcgctaccaaaagcagcatcccatctacaaaaaccggtttcttcattattttatgcattatttttaattgtttcataggttgttttatctaaaccacgaataagcgttgtaatcatttctttcgcagcagcatagtcatctacgtgtaaaatcgaattagatgagtgaatatatcgagccggaacaccgattaccgcacttggaataccactcagtgacgtatgcactttcccagcatctgttcctcctggcgaaacaaaatattgataaggaattttatttgtttccgcagtatctagtaaaaactcacgcataccacgatgcataatcatcgtccggtcaaaaatacgcaataagaaaccttgaccaatttggccaaattgcgatttattaccagtcgtatcattggcagggctagcatctagtgcaaaaaacaaatctggtttaatcatgttggcactaacacctgcaccgcgcaaccctacttcttcttgcacattcgccccagcaaaaagtgtatttggtaacgattcgcctttcaattctttcataagttcaatcgcaagtccgacaccataacgattgtcccatgcttttgctaaaattttcttcggatttgcaagcggtgtaaattcagccacaggaacaatgaattgtcctggtttaatgccgattttttccgcatccgctttatcatctgcaccaatatcaataagcaaatttttaggatccgtcggtttactccgttcagcttctgataacaaatgcggtggaacagaggcaaccacgccaattacaggaccaattggagtcataatttgcactcgttgcgcctgtaaaacttgcggattccaaccaccaattgtttgaaaacgaagcaagccgttgtccgtaatttgcgttaccataaagccaacttcatccatatgagctgcaacaagtacacgcgggccttcttccgctccgtggcgcacaccaaaaatgccacctagcccatcttggataatttcatcggaaactggttcaagttcttttcgcataaatgcacgaattctatgttcgtcacccgaagtaccttgaagttccgtcaattctttaaacatcgctaacgtttctttttccattaataatcatctctttccgtctgaaatctcttttattatagcaaatattatccgtttccgctcgcctcacttctctcttttaccgaaagcgcgttcaaaaatccttttataatcaaaaatttgtagtataatgattaaaagagatgttcgtagtagcatcctttaaaaagaataggaaacactagggaggaaaagcgatgaactggaaagctttcattgcaggcgttggagcaggagcagcggctggacaccttgtttatcattatttacttagcgataaaacaatttctggggacgtcatcttagaaaaggtaaaagatgcattcaagcaagaaggaccaatcgaaggttcttggattcaacttaaaaaacaacattacaaaaaattcgcgattgatactttcgtttaccacggcggaatcacttgtattcgcgaaggcgagaagaagcaattcgaatttatcgcagacgccaacacaggaacaatcatcgacgtatatttagcttaaaaaataaaacgattccccatgcggggagtcgtttttttagcggataaaactatctattttctttttaattactgcttcgtccgtttcgccttgttcaattaactccttcatttgttcagtgtagattaattttgcggcagcatccatcgcttttttcaccgctgctatttgttgcataatagtttctaaatcacgctcttcttctgtcatcgtttttatagaacgtacatgtccttctatcttagcgaatcgcgttaccagcgccttcttttgctcgatatccatatatacccccttatagtataccatgcgataaccccctacccaggatatcatattggctattttaaagtatttataaatataattataccacaaaataaaaataccctcaaaaaaagaagtgatttctcacttcctaattccgatgttctatttttaattcagccttaacatctccattttcagcaatttgaactgctcggaatctggaatcatggtaagataaaaaccaataattcgcaccgaaagtttgcttgaaaattgcttgtttagcagagatggaagtcattggataatcatcatacgcagtcacccaaagtacattttgatgagcaaaagttgggaaaatatccgccatatgaattgctttttctccatctgattctagccaaataaccgaatgcccattgctatgtccaccagtgtgcgtcattttaattgcatcgttgaattctttttctttggtaaatgtatggatttgtccttctatccttagccagttttcttgccagtaagttgctttggaacgaatgttggggtgttgcatctcttcccattctgtttccgaagtccaaatttccgcgtttggaaagatggagtaatcattcccttcttccgaaatgcctgtcagacctaacacgtgatcgaagtgcaaatgcgtcatcaaaacataatcaatgtcttctggagcgatggataattgcgccaaatcttctagcacgaatgattcttccgtcactccataattacgtttttgtttttctgtaagtcgtctgttccctaacccactatctattaaataatttttccctaagtactgaaaaaacatcggatcggttacgttagccaattgatttttgtcgtttactggatattttttctcccataaaggttttggtacaacgccaaacattgctccgccgtcgaaatgagtatatcctccacgtaaccaataaatctttattttaccaatttgaatggaatccacttttaacacctccaattaaaaataaaaaccagatgcagcagatgcatctggttatcctagttaatttctatcaaattttgcttcaagacgatagatggggaatcctttagctgaaaatttttcttcgtattcagttttgatattcccttcgtaatcgctattatgcaaatcaagcgacacaaatgttaataacatattgtattccgaaaaagctactagcgaatattcaaacaaactgcgattatctgttttgaaatgaatctcccctgctttcggcaacagtctctcataaatagttaagaacgtcgggtttgttagcctacgttttgtatggcgttttttcggccatggatcggagaaatttaaataaatttgcgctatttctcctttttcaaaacaatcttctaatagtttagcatctctagcaactaagcgtaaattaggaacgtctacttcaattgctttatcaagtgccgaaacgagaacactttcaatcatttcgatgccgatatagttaatttctggatttgcttttgccataccactaataaactgccctttgccagaaccaatttcgatatggattggattgtcatttccgaatacttcatgccactgacctttgaaatcttctgggtttttgatgtaaattgctggaaattcttccaatctatcttttgcccacggtttatgttttacgcgcatctttctttacacctcatcatcttctattgcattttgaaaaatttgttttgctcgttcattcgcttcgtctgtttgattagtcgtgagttgcataaccgtttgacaaatcgtataccattttaatttgcgatgtaattcttcggttaatgtggtgccgtaattagacagccaacttacccaatcttcgcgtgggatatattggtataaaatcatcccgatatcattcgcagggtctgcaagcattgctccatcccaatcaactagaaacagttcgttttcttcagaaataatccaattattatggttaacatctccgtgacaaaccacataattgttcgtctgagcagcagagagattctgttctaaatagtggactgcttcaattatttcttttgatagattgttattagctcttgtgtttacttttacgagactcaaaagttgatctgcagagaaatagcagttttcgattttcgctagcatgtgttgtaaattttctgaacgatggattttcgctaatagttttgccactcgcggtccaaccatttcttcacgtgtcaaaatgtgacaattcacccatttttgagctgttattacgtccccattctccacgcgtctcgtccaaactaattttggaacgatattctctacagaaagcgcagctaaaaaaggcgaagaatttctttttaaaaagaatttttcgtcttcatgtgttgcaacgaatgcttggccagtttcccctccggccggggctatgtcatattctctcccaaaaaagttatctttcatttacatgcacaccttttattagctctttgcaacttcattatccctcgtttatttcacttccgaacaaataggtaactattcatgattttacttctcttagccctactagtcaagtcaacatatgttcgttatacgtttttttttacaaatttacttcatttatgccaaaaaagcgcattccacaaaaatggaacgcgctttttcgtgattatgctttttccgttttagtaacaattggatccatggcacttctatttttttgtataaatagtgctagaacacaagcgactacagaaagaattcccgctactaaaaaggcggtttctattccgtggatgaggacatggttggcaatatcagttttagttttgccaatgacatcagctggtccgagtttagtggcaaaacttgctgcgctcttagacatgacggttataagtgcagctgtcccgattgaaccagcaacttgacgcatagtgttaaacatcgctgaaccgtgggatgctagttttaatggaagtgaattaagggcagctgtttgtagcggcatcatgaccatcgccatccctgcagaacgaatcgtttgtacgataataataaaagttaacgtagtggattcatccaaatttgtaaacatgaaagtcgatcccgccataataatcaagccgacaagtgataaatatttagccccaaaacggtcaaacattacccctgttacaggcgaaagtatcgccgtgacgagtgcacctggcaagagaactaatccagattccaaaggtgaaaatcctctaactgtttgtaagaaaattggtagtaataacatgccgccaaaaagtcccattaccacaaagaaactaattgctgttgtaagtgcaaatgtaggatatttaaatactctaaagttaagcagtggcgctttgttgcttgtttgataacggataaatattcctagcactactagaccaagaataataaatccagctactttccaagttaaccaatcatggtctccagcattactaaatcctagtaataaactaccaaacccaactgttgacatgataaccccaaggacgtcgagtttcgggaaagttctttttccgacatttttaagtaagaaaatcgctacgacaatatcaagaatcgcgaacggaataataataaagaataaattgcgccaatcatattgttgaacaatccaacctgaaagtgtcggaccaattgctggggcaaagttcatagcaagaccaattaagcccatcgctcgccctcttcgttccatcgggaataagtttaagaccacaactgtaagaagtggcataacaatcccagcaccaattgcttgtaccatacgcccagcaatcagcatggtataatctgtggcgaatccgccaattgctgtaccaatagcaaaggtaatcatcgcgaataagtaaagctgacgcgttgtaaatcgttcaattaaaaaggccgtcattggaatcatgacaccattaactaacataaatccagtcgataaccattgtccttgactggctgtaattccaaaatctttcataatacttggtagcgcgacattcatcaacgtttggttgagaatggtaacaaaggcgcccataagcataacaatcaaaataccgttacgcttcactgatgtacttgctgctttcatattcaatctcgtgcaccttccctttccaaaatggtaataatttcttggtgcatttttagcatttcttttaaccgatcctcgccaatctctaagataggttctaaacggttgaagaatacatgatacgtttctgctgcttttgtagctcctttttcagttaattctaagctgagcgcgcgacgattattttcatttcttgtacgctttaaaaatcccgcttttactaatcgatctacaataccagatacagtacttttaccaagcttcattcgttctgctaattcgccaagtgttaattctgattctctttgtaattctctgattgcaagtaattgggttgtagtaatctctcggttcgcagcttcttcagctagcacgtgatgtgtttttcgttgtacttcgcgaaaagagaaaataacctctttcaccaatttttcatccatgacttccctccatattgttcgctctcaaatatttcgtatgcgaactattagccttttgaattatacaccctgtaaaaaatttgtcaatcgctttaaatggcacttttaagtatgaaagcgacaccaatggagtattttcaacgaataaaaaagttatataaatttttacataggtattaaagcacaaaaaaaccttcctgaaaataggaaggttttctactatgttattttgcaaacactaattcgccacatgcacgagtgatttcttctacaaaatattgatgaagttgcgctgtaattggtccacgttttccgtcagctacttgaactccgtcaatatgcgtaataggtgtaatttcaatagttgtacttgaaatgaacacttcatccgcttcacgaaggtctgttaaagtgaaatccgcttctttaacaggaatgccattctttttcgcaacatcaatgataacttgacgagtgataccatttaagattaagttatctgccgcatgcgtccataatacaccatctttaataatagaaacgtttgaagcagaacattccgttacttgttccccgcgatgtaaaatagcttccaaagcattttgttgatgtgctttattttttgctagaatatttcctaaaaggtttaagctcttaatatcacagcgtaaccagcgcacatcttcttctgtaatcgccgttccaccttcaacgaattgacgctcgtttctaggtacttcacgagctgctgctgttaaaacgccttctagagggaaatcatcagggattacatgattacgtgggttttgaacaccacgagtcacttgtaaatagacattccctgtattgatattattttcggcaactaatttttcaagtaattcacgtagctcttctttggaataaggaataactaagtcaatttttgctgcactagcatataagcgatcaatgtgttcattataagtaaagaattttccattatatagacgaactacttcatatacaccatcaccaaactgatatccgcggtcttcaatgtcaactgtggcatcttctctttcaactaaatggttatttactaatactttcatctcgagtctctccttgcatagttaatttttggaactatctaaaaacttaatgaaacaaagaaactgccgcaaaactaagctttgcagcagttaattttttcaattataacccttacttcgctaatttgtaaagcgcttctgcgtaaattgctgtagcttttaacaaatcatcaaaatagctgaattcgtctttttggtgcatcgtgtcttcacggcctgggaatagcgctccgaacgctacgccagtctccatatgacgtgcataagttccgccacctattgctagtaaagtagcctcttcacctgtttgttttgtatatacttcttgtaaaacttgaataagtgggtgatcttttggtacgaaaagtggtttggaatcttcataatgtgtatattgcgcattatactcatatacgactgtttgcattttatttttaagtttgtccatgctagcagtaactggataacggaaattaagtccatatttgccaccttctgcaacatcataacggataactccaacgttcattgttagttcgccgctttctgcatcttcatagctaatgcctagtttaacagcacgagaatcaccaaacagatagtcacgaccaaatgttacgaaatcattcgctgctccagtcagcttgaatttaccaaggaaagcgactaaatgtagaccagcgttcacaccgttatttggttccattgcatgggcagatttgccgacaatattaattttaacggacttgccattttcttctagtgttccttctactggatgatttgctaggaaggttttgaaggcactcgctactttatcaaagtcttttacatcttctaaaatagctgttgcgtgatctggaaccatgttgtagcgttcgcctgattctacgctaagtaaacggaatgctgcttccccgcctgcttcaccgtctttaaatgatacatctagttctgagatacctttttccgcgtgaatgattggaaattctgcatcaggaacaaaaccaagcgttggttgctcttctgtttcaaaataacgctccacacaactcataccgctttcctcatcagaaccaataataattctaactcggcgagaaagtggtaatcctagttctttaataatttttagtgcatagtaaccagcgattgttgggcctttatcgtccgcaactccacgagcatataatttaccgtcgcgtaaagttggttcgaatggtccgtttgtccagccgtcaccaactggcactacatccacatgccctaaaacgccaactagctcctcgccttggccgtattcaaggtgtcccgctacgtttccaacttctttcgctgtgaagccgtcttttttaccaagctccatcatataatcgagtgcgcgttttacgtccggtccaaacggcgcatcttctgtttttttactgtcatcgcgaacacttggaatgcgaagaagcccttttaaatcttctaggaaatcatctttgcgtgcttccacttctttttgccaattaatttctgtcataattgttattccctccttcaaacttatcttctctattgtaaactgtttttacgtagcttggaagccggaactccctattttctcataaaacctttaattgcttcaaaatcccaacgttccatacgcgaagaaaaaacgatatccatgacgtttaagctttctttttctagtggtaaaaagcgatactcttcgtgttcatcggataattcgatttcgccaccttctggcatttccactaaataaataacgccggtaatttggaagtcctcatggaaaaattcccacgtatcatataaaataaatggctgtacttgtaatttggtttcttcataaacttctctaaaaagagcttccccgtgtgtttcaccgtaattcatgcgcccaccaggaagttcaaaaacttctccttctaccccttttttctttagtgctaaaaattttccgtcttttacgataactgctttcactgcaggatatataggtttcattttacaaaagcctccttatcatttaagataaacatgatttatctgttctttattttacccggttgagtagataaaagccagtgtcataaggaggttttacaaaattgaaaaaaataacaccaaaagcaatgtgcgcatggattccaaaacgtgaagacgaaacacataagggtgactatgggcgcgttctgattgtcgctggaaataaacaatttggcggtgctgctattatggccgcagaagcttgtgtcaaaagtggggctggcttaacaaccgttgcttccgatagcgtcaaccgtcctgctctccaaacaagaatacctgaatgtatgtttattgattacgaaaacatcacaagtctaagtgaacaaatcagccaatttgatacaatattaatcggccctggacttggacttgatgcctatgcggaagaaatttttcgtttagttttacaaaaatcaaccgaacatcagcaagtaattattgatggtgacggcattactatctatgctaaaggagaaaatcctcaccctgccgcaaaactaacctttacgccccatgcaggagaatgggaacgacttaaagtactagcaccagatgctgttacgccaactgatgtagcccttgctattgacgcaacaatcgtacttaaaggtcatcgtacgaaagtgtattccggcgagtctgcttggcaaaatatgtatggcaccccagccatggccactggcggtatgggagatacgcttgcaggcacgatttgcggattaatggcgcaaacagaaaagccgattactggcacactagctgcggtctttcttcacagctatatcggcgaaattttagcaaaaaaacgttatgtagtacttccaaccgaaatcgccgaagaattaccaacttacttgaaaatttttagcgaaactgacgaacatgcctaataaaaaaatcctccctttttgaaagagaggatttttttctatgcttttttaaatttattagcccataatgctaatttttcattccaaatgaagtaacatccgattccgctgaaaagcgctgcgttaccaattaagaaccctgcaaccacatcacttggaaaatgaacccctaagtaaacacgcgaatacatgacgaagataacaataccaagagctagaataccaattgtaaatcgaagccaactgcggctcacgtatagaattaacaagaaagcaagcatgccataaaataccgtagaaccggtcgaatgtccacttggaaaactaaaaccaccttgttcgattaatttataggtaggtcttggacgttgaacgatatttttaataattgaaggaatgagtgctccaccaattaaaacgatgctgccaaaccaaatcgctgtatctacttttcgcataaatacaaatacaatgataatgattgccgttaaaatacaaatggtagctactccaccaatatccgttagataagaaatcacggttgttttagtatccgttatacctacacggataacactattccaataatggtcaaaacgttgaatccactttgccccagtcataacgcccgtcataaagaaaataaatccaaggaggccgataccgctaataataaatggtgtttttttcatacaatcctcctagcgaattcttaatttttcacgtaatctcgttccacgtggtccaaataatttatcggataagtggagtttaaatgccatgtaaccgtagaaaatcgcacctactccaccgcaaacgatggtaattattaatgcagggattttccggtccgttgttacaaaattagacatcatgatataaagcgcaataactacaagtcccattatagctgtcattacaaagaaaagtaccgttcgcctcaaaataactttgaacgaaaaacgaacatatttcttaataataagaagcatgaaaatacacgatacagcatagccaatcccagttgcaataatggatccttttgcttcaaataacataatgagtggcatttgaagaactgatttagctagtaaacctagtaataagccaagtaccgtaaatcgttgttcgtcaatcccttgaaggactgcagctgatacgctaaataacgagaacaaaatagcaattggcgcaaaaagttgcagtaactctgtaccattatcactaggtgagaaaaacaccgtaaatagcggtcttgctaacatcgcaatcccaaaacaagctggaattgttaaaaataataaaatttgaaaaacatcattgagttgacgttttacttgtgcgtattcttttctaacataagcccccgtcacaagtgggacaagcgccatcgaaaacgcaatcgcgagtgtaccaggaatcataatcaatttctgtacatcaaagttaataattgccacatacgaattcactagttccggagtaataccaatatattctaatacccgccctaatgtaaactggtcaatcaattggtaaagcgacgttgctgatccaacaataataaatggaatcgccgaaagaataatatctttataaagcgtcgggattgaaattttcacagtccctctgtcttccaaaagcattcgatcaagaccaggtttccgtttgtaaaaataccaaagtagtaaaagcagacttgcaaaagcgccgacaaaagcagagaaagtagcgatactaatagctgttactacatttccatcaagtacatacatgacaataaatgttccagcaagtaagaacataattcgtacaacttgttctaaaacttgtgatacagcagaaggccccatcgaattatatccttggaaaaagcctcgaagtaaactcatgactggaataattagtaaggcaaaactaacggcacgaataacttgaatcccatctgctaaactataaccaccctccagttgttgcatgcgagcaagcgttggggcaagtccatacattgctaagaaacagacaataccggagaaaatcattaaatatacaccggttttaaataaacgtctacctacagcatactcttccatcgcattatattttgctatatatttagcaacagctagcggaatcccggcagtcgcaatgcttaagaataattggtacggcacataaccgaaattatacagaagcgctggttcatctcctccaataatcgcataaaacggaatcacatacaatattccgagcactttagagattaatgtccctagcgtcagaataaatgttcctctgagcagttttgaacccatcgtctaacttcctttacattaaattatatatccttgtttactttaccattaactcttttaaaaaaaaagaacaaacccaaataaatatcggcttgttctttacaaaaagtttaaatcaaatgaagttttttacgaattttatacattcggtcccctaaaatatagtttaacagtcctgcttttgcagctaaaaacgcataaatataggcaccaaatccagctgaaacaaaaacaatgactagtgctgataatcttgcatgcggatttaaaaataaaatcagcccatgatatatcaaccaaacactaagaagcatcaccgcgctaattcctaaaataagaataagtcgtctaaataaatatttaaaggagtacttcgcatattttttaataataaaaatggtgaatactacggaaacaatatatccaagtcccgtagctaatgccccaccttttgccccaaaaagtaaaattaatggcatttgcaaaaccgattttgtcagtaaaccgagtagcaaactgagaaccgtatatcgttgctcatcaattccttgcaaaatagctgctgttacactaaataacgaaaagaatatggcaaatggtgcaaaaaactgtagtaacatcgaaccatctgtattataaccataaaaaattgtataaagcggaacagctaaaagggcaattcctaaacaagctggcaccaccaaaaatagtaacacttggaaaacggctgtcaaatgatgatgaacttcacggattcgtcctttatggaaagatgccgccactaaaggcacaagagtcatcgaaaacgccaaagctaaagttcccggtatcataataattttttgaacggaaaagttgaaaatagaaagcaaatcttccgctgttttcccgtccataccatcgtaggttaaaattcgagcaaacgtaaataaatcaatttgttgataaagtgacatcgccattccaacaataataaatggcaccgcagatattgaaatttcttttaatagatgaaaagtcgaaacgcgcaacttattgtcactgccatcaatcattttttgaatgcccggcttccgtttccggtaataccaaatgagacaaattaagctgaaaaatgcgcctacaaaagccgcgaatgtagctaaactcattgctgttacaaggcttccaccaattaaatgaagaacaatatacgtactagctagtaaaaatacaattctcgctatttgttcaattacttgcgacacggcagaaggtcccatcgaatgaaacccctgaaaataacctcgtagcaagctcattactggaataatcagtaacgcaaaactcaccgcacgaataacggttgtaatatcttcaatactcgtcccaccactaacctcttgcattccggcgagtatcggagcaaaaatatacataattaaaaaactagcaattcctgtaaatatcattaaataggtacttgatctatacaatctttgacttaaagcatattcatttaacgaattatacttcgaaatatatttggcaactgctaatggcactccagctgtcgcaatatttaagaaaatttggtaaggaacatacccatattgatagagaatggttgcttgttccccgccggcaatccagtaaaatggaatgacatataatattcctaaaatctttgacaacaatgttcctgcagtaagtacagccgtccctcgcattaattttgaactcataatttctgttacctcaattgattttttcttttaagtctgtctgtttgatagggttatgtaaaaatcattcttacattactacttttatcgcattcttctaagatttaaaatacaagtaacactcaacgcaagtagtactgctggtaaaacaagcgaaacaaagttcacaccactattaatcattgacaaaataacaccaagaatagtaaatgcagcgtataaataataaacaagtggcgtaattataatgccttttctaagtttgttaaaagaaagaaataacataatcgtaaatgcaatacaaataactgccataatagttgtcgtcataatcgtgttttgaacgaccgcagtggcatgcgcattagcaagtacttcttttctttgttgtaacgcaaaaagacctacaatagagactgcacttaatactgcttgaatagtcgatacaatcgctattccaagtgtgacattcttcgtgttattgagcattctagcatgctctggtttaacttcaacggacatccttacaactcctctttaacattctatacaccagactttaccatatttaaagagaaattgtaagtagtaattagtttttgattcgaacttcagcagccttttgtaaaaacgctcctagctctgccgttttttcttcatgcaacatttgcacgactttactaccgattatcacaccatcacatacgtgcgcaaatttttctacatgttcaatagaagaaacaccaaaacctgcgagaactggaacagggctaatgcttttcaaataagctaaatggctatcaatatgggcatcaaattcactcctcacaccagtagttccgttaactgttactgcatatataaatccttctgcctgtttcgcaatttcttcaaggcgctctttcgggctagtcaatgaaacgagtggaatgagtgcgatatctgtcccctgaagttctggtgtaatcagtttttggtgctcataaggtaaatccggaataataagccctttcaccggcgttttctgcaccaattcaacaaattttggaatacctaaatgaaaaatcggattaatataactcataataattagcggaatttgcactttactcatagccaatttatttaaaatggcttctaaactcacttgctcctttaaagcacgtaacccagcaagttgaataattggtccgtcagcaaccggatcagaaaaaggaatgccaatttcaatcgcgcttacgccagatttttctagaaacaataactgttcttctaaattatctaaaccaccatctccacccataatataagtaacgacagcagcatgctctttttccgctagtttattcgttaatgttttagtcatttgtttgtccctccaaacgttcttttagttggttaacgtctttgtctccgcgaccagataaacaaacaaccatactttcttctggacgcattttacttgcaagtttaaccgcatagctaattgcgtgagaactttcgagcgctggaataattccttccgtacgacataaaagttgaaaggcttcgactgcttcatcatcagtaacagaatgatacgctgcgcgacctaaatcacggaaaaagctatgctctggaccaatacccggataatctaagccagcagaaatcgaaaatgcttccaaaatttgcccattctcatcttgtaatacatccatcatcgctccgtgtaaaatcccaatttctcctttggaaatggttgctgcgtggaattctgtctctaatccgtgaccagctgcttccacaccgtgcatttgaacagaagcatcgtctacaaatggataaaataagcccatcgcattactcccgcctccaacacaagctacaattgcatcaggaagcttaccttctttttccaagtgttgtttgcgtgcttctattcctattacactttggtaatcacgaacgatttctggaaatgggtgtggtccaagaacagatcccataatgtaatgcgtatcttccacatttgcaacccagaacctaagcgcttcatttactgcatcttttaatgttctgcttcctgctttcacgctcactacttttgcaccaagaagttccattctaaatacattgagtgattgacgttttacatcttcttctcccataaaaatagtacatttcatattaaaaagtgctgcaacagttgctgttgccacgccgtgttgacccgcaccagtttctgccactactttttgtttgcccatttgacgtgcgagtaaggcttgaccaatagtattgttgattttatgtgcgccagtatgatttaaatcttcgcgttttaaataaatttttgctccgcccgcatgtgctgttagttgttcggcaaaataaagtggtgtttctcggcccacatattcttttaaataatagtttaattctttttgaaaagcaggatctgttttggaagcttggtacgcctcatctaattctttcactgctttcattaatgtttctggtacaaatctaccgccaaattttccgtaaaagccattttcgtcaggtgcttgataagtcattattattccactccttttgctgttttaatgaagcatttaattttctgcggatctttttccccatttgtttctacgccagaggaaatatctactgcatatggttcaaagcgtttaatggcttcttgtacattctgagcatttaatccgccagctataattaatttatttttcgtaagtaagtctctatctattttatcccaatcaaaagtttttccactgccaccttcatattcttctgctggtgcatcaagcaagatgtatgcatttggatagtcatttatattgtctgggagtttcccatctttcacaggaaaggctttaattacttccgcatccgttcgatttgcttgttcagctggttcttgtccgtgaagttgaacaatgtctaatggcacacctttgattgctgccgttaactcttcttcggtaggattaacgaatactccgacctttttgacgccagcaggaatatttttggctaattcatgtgcctcatccaccgtgacttggcgcttacttttcgcaaaaacaaaaccaatcatatctgcgccattttcaactgctgccgctacatctactgcttttttcaatccacaaatttttacaatcatcgtgtcaccttcaaactcttcgctgccacttctggagtcgcttctcgcattaacgcttctccaacaagtaccgcatcatatttttgactcacgcgagccacatcttctgctgttcgaaaacctgattcgcttataaaacaagcatccgacgaaaaatcactcgccagtctttcgcttactgcaatatccacttcaaatgtgtgcaaattccgattgtttacaccaatgagttgagctccgattttttgagcaacagctaattcttcctggtcatgtacttccactaacacttccaaatcaagcgccagagcttgttcaaacagggtgattagcttctcttctgtaagtgccgaaataattaacaacacaaccgtcgctcccgcatttcgagcgcgaatcaattgtttttcactaataatgaaatctttacagagtacaggaattcccacatttttcgctacttctcgcaaatcttcaatcgagcctttgaaaaaaacaggatctgtcaaaacagaaatcattcccgcacccgcggcttgataagacttggcttgcagaactggattcacgcccatattgatttcccctttggaaggagaggcgcgttttacttctgcaataagttgcatcgtgtttgtatttgcttttaaaaattcataaaacgaataagttttccgtttttctgctacttgttctaagggcatttttgcaacttctacttctttttgcgctaaaatttcttctaaaaatgtcattttgctagcacctctttttgataagtaattaaatctgccaatttttgtttggctaggccactactaattaagtcctttgctaaatccacgccttcttgcaccgtttccactttgccatttgcgaataaaccaaaaccggcatttaaaagcaccgtatctaagtaagctccaggttctccttcaagcacactacgcaaaattgctgcattttctttagcatctcctcccgtaattgcttcgagtggataactagttaaaccaacatcttctggacggagtgtatataagtgaacttcgccgttttcatataacgcatagtgattttctccagctagagaagcttcgtccataaaaccagcgccatttaaaacgactgcgcgttttcgcccgagttgtccgagtacttctgctgtttgctctaacaaatcacggcgataaattcccatcaattgcgtttctaggtgaaccggattcgtgagtggcccaatcaaattaaaaattgttggcgttccgagctcttttcggacatccataacgtacttcatattcgggtgaacatgtggcgcaaacaaaaaggcaatcccgactttttcgagtaaataagtcatatcttctgggcgcaaattaatatcgatccctaattcctgacaaacatccgcactaccagaacgactagaaatgcttctattcccgtgtttcgcaaccggaatccccgctgctgcaagaacaaaagctgacgttgtactaatattaaaactattggatttatctccgcctgtcccgcaattatccatcgccgtaccagctggaaaagccacttgaatggctacttgctgcatcgcctgcgcgattcccgccatttcttctgccgtttcccctttcactttgagcgccattaaaaaagcagccattttggttttcgaaagtcgtccttcaaagatttctgttgcgataatattcatttcttctttggataaattttcttggtcatatactttttgtagtaagatttccattttctcgcgccccttccactatatgaataaagttttccatcatttgttttccgtcattcgtaccaattgattcaggatgaaattgtaaaccataaaccggataatcttttactttcatcgccatcacttccgaatcgtccgtcgctatcgctaacacttctaaaacatccggcaatgtgtttttatctactattaaagaatgataacgcatcacaggcatttcttctggcaaattagcgaagattgctccagcggtttgacgcatagtagaaactttcccatgtcggattttggcagctcgttttacttctccgccaaacacttcaccaattgcctgatgacctaaacaaatcccaagtaatggcttttctttcgcaaacttagccaccacttcttctaaaagaccagcatcacttggttttccaggtcccggtgaaagaactatcccatcagccaaagccgctatttttattaaatcagccgcatcattccgtttcactaccacttcactaaattctgctaaatactgctctaaattaaatgtaaaagaatcatagttatcaattaatagaatcattctcccacctccaaaagtgccttcgctttttgtaatgtttctaagtattcgctttctggatcggaatcatagacaattcccgcaccggcttgaacataagcttttccgttatgaagtaccatcgttctaatcgaaagtgcgaaatccgaatcaccatttttagttaaataaccaaccgcaccagcatatggaccacgttttacattttcccattcatagattcgctccatggctcttattttcggtgctccactaacagtcccggcaggtagcgtcgagcggagagcatcgattgcagtaagtccagtttttaaggttccttctactactgaaactaaatgcattaagaaacggtatctttcaatagtaaggtaaacaggaacatgaactgatccagtttctgcaattttcccaatatcatttcgccctaagtcaaccaacatccggtgctctgccaattctttttcatccgataacaattccgaagcaagtagttcatcttcttgtttcgttgccccgcgccgtctagttcctgcgataggatttgtaatcaccgtccgccctttcgttttaattaaactttctggagaagagccaattagcaccgtatcaccaaaatcaatgaaatatagatacggagaaggatttaacaatcgtaatttccgatagtaatcaaatggcttcacagtaaaatctgcttctaatcgttgagagagaactatttgaaagaagtcgccctcttggatatatgtttttgcttttttcactagccccatgtattcatctttcgtatagttgctcttatatgacatttttggaacatgaacagccttatgctcgtcttttttcggtgtagtaagttcggtaagcatcgactcaagcgccttatccaagtctgcttcacttctgcctgagtaacaattatcttgcactaaaataagttcttccgcttgatggtccataatgacaaaactttcatatacataaaaacgaatatctggtatatccctagtttctactggaatttcgcctaaatcttcataaagcgcaataacgtcatatccaacatagccaattgcacctgaatcaagtggcaattcaagttcatcttctcttgctttttcaataaataattcaatttcttttaagggatctgctacaacttgatgtgttccgtctatataataatcatgttgatatactttaatttcatgtacaggattaatggcaatgatcgaataacgtccagcctccgcatctttcgccgcaccttcaagtaagcttttacctgtaccagaaagtctttgaaacgccaaaattgcggttaatgtatctgcatccatttttttcattttcctcatctaaatcatcccttcttcttcactaaaataaaaaaatcctctgaaaaagcgcaaaatcatgctttctcagaggacgagttatcgcggtgccacctcattttagggataaaccctatctccgtgctgcaatatttgcagctgctctataacgggagcacccgttcacccctacttgatttcaaggtatcacgcacaaggcccattcctgaatcatctatttattagctcccaccaaccgctaactctctttaaaaatcgatgaaaaagtactattcttgtttgatgttttcattttataaaattaaaaaagggcctctctccaagcctagcaaatatactagacaaggacgagagacccgtggtaccaccttgattaactgtaaaaacagttcacttaatccatccaaatttcgaatgggcgccttgtgtaacgataaggcctaatcgctgtatcctactaagaaaatcctttcagatcagagctcagaagtccattcacatcatgtccgctactgactttcaccaaccgtcagctctctaaaaactttcatcatgctacttactcttcttcaatgctatcattttttacttgtgtttatcttacataagaaaatcacgaaagtcaagaaaataaaactactttatactaaaaaggtttcaaaacgataattaataaacaagtaagaaaaaagaactacccatctaaaatatatttcacttcagaaaaagcatgctattctctctattataatgaacactaacttccttaaaaaccctataaaatatatgttttcaaatgataattcgcttaaatcccaatgataaaaacactcatataaactatgcctaattaactataatacaactttacaaaaggacttttcaaccatctttatcaatttgtgaagtttttcacgtgaaacactggacaaacttttattgatggattatactaacggtgtaatcaaataaaacaaaagaatacggcaaagcaacaagctaaatttttttggattatcagggacgtcaaaagtctactatggacgttttgagtcccgaacaaatattaggaggttctggaaaatggcaattaaagaaaatgcggcccaagaagtattagaagttcaaaaagtgattgacagattagcagacaatggacaaaaagcattgaaagcatttgaaagttacaaccaagaacaagtagacaatatcgttcacgcaatggcacttgccggacttgaccaacatatgccccttgcaaaattagcagtagaagaaactggacgtggattatacgaagataaatgtattaaaaacatcttcgcgacagaatatatttggaacaacattaaaaacaataaaacagtcggagttattaacgaagacttacaaactggtgtgattgaaattgctgaaccagttggcgttgttgccggcgttacacctgtaactaacccaacatctactactcttttcaaagcaattatcgcgattaaaacgcgtaacccaatcatctttgctttccatccaagtgcacaacgttgttcatcagcagcagcgaaagttgtatatgatgcagcaattgcagctggagctccagaacattgtattcaatgggtagaaaaaccttccctagaagcaacaaaacaattaatgaaccatgataaagttgcacttgtacttgcaactggtggtgctggaatggttaaatcagcatactctactggtaaacctgcactaggtgttggaccaggtaacgtaccagcttacattgacaaaacagctaaaatcaaacgttctgttaatgacatcattctttctaaatcttttgaccaaggtatgatttgtgcttctgaacaagcagtaatcgtagacaaagaagtggctaaagaagtaaaagcagaaatggaagcaaacaactgctacttcgttaaaggcgctgaattcaaaaaattagaaagctatgttatcaaccctgaaaaaggaacacttaacccagatgtagttggtaaatcccctgcatggattgcaaaccaagctggcttcaaagttccagaagatacaaaaattcttgtagctgaaattaaaggtgttggcgacaaatacccactatctcacgaaaaattaagcccagttcttgcatttatcgaagctgctaaccaagcagaagcattcgatcgttgtgaagaaatgttagtatatggaggacttggacactccgcagttattcactctactgataaagaagttcaaaaagcatttggtatccgtatgaaagcttgccgtatcattgtaaacgcaccaagcgcacaaggcggtatcggtgacatttataacggcttcatcccttccctaacacttggttgtggatcttatggtaaaaactctgtatcacaaaatgtaagtgcgactaacttgctgaacgttaaacgtatcgcggatcggagaaataatatgcaatggttcaaacttccaccaaaaattttctttgaaaaatattccactcaataccttcaaaaaatggaaggcgttgaacgcgtatttatcgtaactgacccaggaatggttcaattcaaatatgttgatgttgtaatcgaacacttgaaaaaacgtggcaatgacgtatcttaccaagtatttgctgacgttgaaccagatccatctgacgtaacagtttataaaggtgcagaactaatgaaagacttcaaaccggacacaattatcgctcttggtggtggttccgcaatggatgctgccaaaggtatgtggttattctatgaacacccagaagcttcattcttcggcttgaaacaaaaattcttagatattcgtaaacgtactttcaaatatcctaaacttggtggaaaagcaaaattcgtcgcaattccaacaacaagtggtacaggttctgaagtaacaccttttgcggttattacagacaaagaaaataacattaaataccctcttgctgactacgaattaactccagacgttgcgattgtcgatgcacaatatgtaactactgttccagcacacattactgctgatactggtatggacgttttaactcacgcaattgaatcttatgtatccgtaatggcaagcgattatactcgtggattatctatccgcgcaatcgaacttgtttttgaaaacttacgtgaatctgttcttactggtgatccagatgcgcgcgaaaaaatgcataatgcttctgccctagctggtatggcgtttgcaaatgcgttcctaggaatcaaccacagcttggcacacaaaattggacctgaattccacattcctcacggtcgtgccaatgcaatccttatgccacatgttattcgttataacgcacttaaacctaaaaaacatgcgttattcccaagatatgaaagtttccgtgctgatgaagattatgctcgtatctctcgtattatcggcttccctgctgcaactacagaagaaggcgttaaatcacttgtagatgaaatcatcaaacttggtaaagatgttggtatcgacatgagtcttaaaggacaaaatgttgctaaaaaagatttggatgctgttgtagatactcttgcagatcgcgcattcatggaccaatgtactacagccaaccctaaacaacctcttgtaagtgaactaaaagaaatctaccttgaagcttacaaaggtgtttgaaactagctaacttgtccaccattaatatataaagttagaagaaagcgcaagtccatcccagggcttgcgctttcgctttagtactaaaattagtataatggaacaagaatggagttgattcaatgatacaagcaacggttccctactttacttttgacggggaggccacagaagcactagatttttataaaaaagtgtttcaagcggaaattacgcaaatgcattattttcacgaaacggaaggattctctggagataaaaaacaaggagaacgaatcctccatgcaagactggcgaaagatgagaaagatttattttatttctctgatacggttgaaggcgaaacagacgcgggcaatcgcctagcacttgcggtgaattttagttccgaggcagaatttgtacaggcttttatcctactttccaaaactggaaccgtcgaaattccgattcaaaatacattttggggagcaaaatacgcgaaagtaatcgaccactacagcatcgactggcatctcaacttagaaaacgagtctactactaaagtatgattttttcccgtcctctagccgaatgtaattagaactaaaaaatagtacaattttagtagtgagagaaaaaaaggagtgagttcatgactgagacagttttaaaattagaacatgtcacgaaaaaaatcggacaaaaaaatattgtccacgatatcagctttgacatacataaaggagaagtatttggtttactcggcccaaacggtgctggtaaaacaactattatccgctctatcgttggcttaattcgtcgatcagaaggtaccgtttttattaatggtaaaaatgtcgacacagaatataaagcagcgatttcagaagtaggtgctattattgaaaatccagaattttatatgtatatgtctggatgggcaaacttaaagcaattcgcacgcatgagtcaaaaaaacattaccgacgaacacattcgtgaaatcgttgaacttgtaaagcttactggcgcaattaatcagaaagtaaaaacgtattctctcggtatgcgtcaacgtttaggtgttgcgcaagctttaattcatagtcctgctttacttatcttagatgaaccaacaaacggacttgatccacaaggtatggccgaattcagaacgctgattcgcgatttagcgacaaacggcacttctgttttaatttccagccatttacttagcgagatccaacaaatcacagatcgattcgctattattaacaaaggtgttttaacgcacatcgaaaaaatgagcgatcttattgaaaatcatgttgccgcttataaactaaaagtcagcgatcccgtagcaactacaaccgttctcgctacactcccagtcaagcttgttgctcaaaatgaggatctattcaaaatcgaagtagctcacgaagatgtacatctaattgctcgtgcacttatccaagcaaatattgatttattagaaatggttccacttcaagcctcccttgaagaacgattcctcgaattaacaaaaagtggaggtgcagaagtatgatagcattagtaaaaaatgaatttaccaaattattttccagaaaatcaagttggattatgcaaatcgtcttatttgtagcagttttagctcttgctcttctaatgttttttgttagtaaaatagatactagtggtgttgaaggcggcgatgcaagcaatgccggaattactgcttattacgatgataaaggtgccccggttagcgaagaagaatattggaactccgcagataaagatggtactcctacgtataaatccgaaacgttatcattaactgattccgttgcttacttaaaaacacaagaacaagcggctccaacaaaagaagccaaagaaactatccaaaaacaaatagatttttaccaggcttatgttgatgcagatgaaaaacctgctagtaattctgctggtatttcaagcgcagatttcttcgcttcattaggtagctctggagccgttgcgacaatgctcgttgttgttgtagcaagtatcatcgttgcaacagagttttccggtgggacaatcaaacttttactgacacgtccttattctagaagtcagatactattctccaaatacgtaatgtgtatcgtttacagcattattagctctatcacattacttgtagctagctttatcttttcatttattctaccaaaacaatctattttcatgccgctctccccttcaacgggtgcaatgactgctttcgaacatgcgtggatgctacttggtacgaacttcttactgatgatcgtatacgcaactattgctttcttcttctcatctgtcgttcgttcacaagcacttgcagttggtgtcggcgttggtgtactattctctggtggaattattcgccaattactacctctcgctatcgaaaaatacgattggatgaaatggattatcttcaacttgcttagcctaaacgacacagttggcggttctaaaatcgctggtggcctagcagattggcaaataatcgccggtctaggtgtttatacagcgattatccttttcttcactttcttcttattcaaaaaacgagatgtcgctttaagttaatattaaaaaggctgtccgcattggacagcctttttttaatgcctaataatttgaattttatcggtctgatttgtatcaattcttgcggttccaccgattgggaatgttgcaattggctgtgtatgcccaaaatctgcaccagatataacaggaattttttgtaatgctgtttttgtttcaataatatacgctaatttctccgccgtcatcgctgtcttttgttgaaaacgaccgattaccatcccttctatctcatctgcaccaggttgactaagtagcgattccaaatcgcgatcgaatgtttctggaatagtcataaaatcatcttcaataaataaaattgtccccgccaagttaggcatgtattcggttccttggagtaaattaagcgtgcataagttcccgccaatgatgattccttctgccactccaggttgcataacgactagtccttcattcgggatgaaatttcgattctcttggtccaaataccattcgtcgtcactccatgtagcactttcttttaacgcaaatggttctttttgtaataaacaatcactaaatgattccattacataatccagacctttttccatggaaaaacttgaaaaatgcgcaccagaataagtaatgagttccgtttgtgtataaatagccgttgctaaggccgtgatatcggaaaagccacataaaattttaggattttccgaaattaaatcataatccaaatacggcaacaattgattgctattaaaaccgccaataaccgtcaaaatcgcttttacactcgaatcattaaaggcttcatggatatcagcaactcgcgaacgaatgcttgaactcatcatgcaatccatttctgccacatgttcgccaaaagtgactttaaaacccatatcagttaggcggttaacggcaatttccacttgattgtcagccataatgcctatagaacgacttggtgcaataatccgaatttcatcaccttgttttaattttgctggaatcacttagtagcctccctatttaacgtatggaatggacacgaaagcaaatggtcgtcaagaatgccaattgcttgtaaataagaataaataatcacggggcccacaaacttaaaaccacgtttttttaaatctttactaattttttccgatagttctgtgctagcaggtacttgtcccatgccttgccatttattaataatacgctcattatttgtaaaaccccaaatatagtttgcaaatgagccgaattcagcttggactttttgcgtagctagggcatttgtacgaactgcttttactttaagacgattcttcacaatagccgcttcttcgacaatcgtcgccagctcatcgtctgttaagagtgcacatttatcaatatcaaagtgaaaaaaagcttcttgataggcttttcttttatgtaaaattaatctccatgagagtccagcttgtgctccctctaaattgagcatttcaaataaatatgtgtcgtctttactcgggacacaccattctgtatcatgatattctaattcaaacgggtcattaatcgaccaagggcaacgtaattcttcagacaaagcgagttcctcctatatagttaaaatgtaatgcacactgattaaaatagccacaaataggccaatacaactccaaattagccttttttctctccattgactaactgctactgcaatactaagtgccaaaaataaaaagagcagccagttcgggacatcaggtcgatagttgctcgtgaaaataagataccctactactactgcaattattccagtcactataaaactgatcttctgatacctcattcgctcaagcctcctataaaccaatgataaaacatatgttctgtttttgcaagtaaaaataaaaagaggcgaactttttttgctcgcctctttttacaagttatttcaatttgccacgtaggaccattggtaaaatcccgccgtgacggtaataatcgatttctacttctgagtcaaagcgtgcaagcgcatcgaaagtaatacttgagccgtcttcacgggtagctgttacttttacaaggtctcttggagctacatcttcaccaatttctacttgtaagctttctgagccagttaggcctaaggtttctgcatcttctcctggttggaattggagcggtaaaacacccatcataacgaggttagaacgatgaatccgctcgtagcttttcgcaataactgttttaattcctagtaagttcgttcctttggcagcccagtcacgtgatgatcccatcccgtaatcgtcaccagcaagaatgactaaaccagtgttattttcgatatattttctagatgcgtcataaatcgacatcacttcgccagttggccagtaagtcgtatagccgccttcagttcctggtgcgatttggtttttgattcgaatattcgcaaatgttccgcgcatcataacatcgtgatgaccacgacgagagccataagagttaaaatcgcgaatcgctacgccttgttcttgcaggaattttccagctggcgtatctttaccgattgctccggctggtgaaatatggtcggttgtaacggaatcaccaaatttaccaataatacgtagtccagataatgcttccactttaccagcttcttttgctaaattgtcaaagaatggcggattcgcgatatacgtagaattttcatcccatttgtatagggcgtcttccgttgtttcgattgcattccaagcttcgttttcatcaaaaacatgggcatattgttcacggaaaagttctggagttacagtttcttctacaagagccttcacttcttctgaacttggccaaatatcgtctaagaagacttcttcgccattattaccgcgtccgattggttcggttagcatgtcgacatttgttgtcccagcaagcgcataggcaacgactagtggtggtgaagctaagaagtttgctttcacaagggcatgaattcgtccttcaaagttacggttaccacttaatactgcagaaacgagtaaatcgctatcttggattgcttcttcaatttcctcttttaatggaccagagttaccgatacacgtcgtacaaccatagccaacaaggtcaaacccaagtttttctaaatatggaagtaagccggctttttccaagtagcctgttacaactttggagcctggcgccaaggaagtttttacgaattttggtacttctaagcctttttcgactgcttttttagcaactaaaccagcgcttaacataacgtatgggttagaagtattcgtacaacttgtaatagccgcgattgcaaccgaaccagttttcatagtggattgatcgccattgccaaaagtaacggttacttctttgtctaaggctgatttatctagtccgaaaccttggttgcctgctttggcagtaatcgattcgcggaatgtttctttcattttcgaaagagggatcaaatcttggggacgttttggccccgccaagtttggttcaatcgcagaaagatcgatttccactgtttgcgtgtagtttggttctactttttccggagtgaagaataaatcatttgcttctaaataagcttctactaattcgatttgttctttgtcacggccagttagttttaggtagttaagcgcttctttatcgactgggaaaaatccacaagttgctccgtattctggagccatattcgcaacggttgcgcggtcagcaagtggtagtgtcgcaacacccggaccataaaattcaacaaatttacctactactttttgttcccgtaagacttgggttacttttaaagcaaaatcagttgctgttgcgccgtttggtaaagcacctagcaatttcacaccgataacttctggaattgggaagtaagaaggttgaccgagcatgccagcttctgcttcaataccgccaacgccccaacctaaaacgccaataccgttaatcatcgttgtatggctatctgttccgacaagcgagtctgggaacgctacaaattcgccgtctgctacttcattcgcaatcacgacgtttgctaaatactctaagttaacttggtgaacaatacctgttgcaggtggaacagcacgatagttatcaaatgctttttgcgcccaatttaaaaactggtaacgttccatgttacgtttgaattcaagttccatgttaattttaagtgcttctggattcgcatagctatccacttgtaccgagtgatcgactactaagtcaactgggatttccggattgattttttctggatcgccgccaaggtccgccattgctttacgtaaagaagctaaatcaacgactgctggaacgcctgtgaaatcttgtaaaataacacgggctggtttgaatggtacttcgccttcgttgccatctttagaccaatgggctaagtcttctacgtgtgagtccttaattactcggccatctgcttgccttaatactgattcaagtaaaacacgtacagaataaggtaatttctcgatgtttgtaagcttgtcctcttctaaggttttaagtttgtaataatgatacgttttgtcgttcagctgaaatgatgctcttgctttttctttccaattagtcatccacgtttcctccttcaattcttgaaacgattggtctctctcatctattgtacttaaaaacaagcgataagtaaacaaagagaatctgctataatttgataactttttcttataataaaaaaatgaatgacaacgagtgccattcatctgtactttaaacacctaaattggttaacgcttgttctaaagagccaaatgattcgagtttggaaatgtttgaaccaacttggattgtgcgctgagcgaaacttggtcgcataccagaaagtattggtactaagccaattaatttaaaagattgaatcatatcctccatatgtttggttgcgaaatcatcttttaatactgcacttgaaaaatcaatgacaatcgtatctaaattcagcttatccgcagattctactgctttctctttcataaaatagcctctatcatcatctaaactaccaacaattggtaaaacgccaatagaatccgtgataggaataattcgcgtggataactgaattatttcttttcgctgtgctgcgacttgatttctattttcttgcataaatccttctaataactgttgctgaatcgacgaaagcgtatcttttatagcaagcataaattggataatgtcagcatctgaatagaaaacattctctgtttccttccatttgactaagctagtgataatatatttttcgacttcactcatatgttgatggatttttctaatatcggttttatcattgaaacgccttttaccgatactttcaaagtcgcgtttcttcacaccagttattacatcaataatcatcccacatgatgcggtactcagcgcacgaatggagacttcctcttccccgctactaagtcttaatttaaattcatctgtttcactataataattttcataaaacatattcactaattctgaacgacgactaatcaaaaattccttaatttgcataaacttctccttttttcaccgatattatctcgcaaaaattaagatgttatctgcatgtaaattttcaatcattttatctacttgtttttctgttaaatcaaagtcttccaataatctttttacagatttatcgtctgtttttgagaaccatttggcaaagggaccggcagcatacaaagcaccgtatttgggattgtaagcttgtggaataacaatggctccacttagggattggaggattccagaaataataccgaaagcctcttcattaacagggcgttcgatttcgatattttctttttctgctaaagtttctaagtttttgttgtgttttgatttagctagaacagaaatatcttctttttcatatccctcacttactaatttgttgatgatttcctctgctgcctcgacgttttgaactgcgaatacttcccactttttcattatttgtcatcccttccattatccaattgtaagatttgttttatttcttctgtgcttaatttccctagcatttgttcgcctggttgaattagttcgtctactagcgcttgttttttcttttgcaattcaaaaattcgttcttctatcgttcctttagtgatcattcggaacacttggacgacgcgtttttggccgattcggtgtgcgcgtccggtggcttgttcttctacggccggattccaccataaatcgtataaaatcacggtatccgcgccaacaagattgagtccggttccgccagcttttaaggaaatcaagaaaatatcattctccccttcgttaaaagcattaaccatatctagtcttgttttcgatggtgttttaccatccatgtaaaataagggctgcccctcttcttctaatttttggcgaataattccaagcatacctgtgaactgggagaataggagaatacgtttaccgttttctcttgctgtctgtattgtatcaaacaactgtagtaatttaccagattcaccttgataattttccacaaaaagacttggatcacaacaaatttggcgtaaacgggttaatcctgccaacaatttgattcgttcttctccagcatttccattactcgcttctaaatctgcttgaattttttctaaataggctaagtaaattgttttttgttcatcagttaattcagaatacaggttggtttcaattttatcaggtagttctttgacgacatcttgttttagtctgcgtagtaagaatggacgaatcattttcgcaatgttatcatatggaatttctttgaatttacgtaacgatggaaaaaatcctggcattaacgtttggaaaatcgcccataattcatcgatgctgttttcaagcggcgttccactgagagcaaatacatgattgcgtttgagcgcgcgcacagcttgagatgccttcgtatgataattcttgatagcttgagattcgtcaataataacacttgaaaaagcgacatctgcaaaatggacaatatcttggcgtaacgatggatacgaaatcaagtaaacatggccacgcttcatttcttccatttcagccatccgagattgtttcgttccatgtaaaacggtcactggaatagctggcgcaaatttttctaattcgctttgccagttatacagtagtgatgctggtgtaataattaagaccggttttaagttaggattatcctctaactcagatgctagaaaactaatcgtttgcacggttttcccaagccccatatcatctgctaaaatgccacctagattatatttcgcaagggatttcatccattcaaacccagttagttgataatcacgtaactctgcttttaatccttttggtaacgcaaagctgtcttcggattgcgtcgtaatatctgtaagcaattcgcggaaagaacgactgaatttatgatgttcgtcttgcgttcccgctcctaaaatatcataaatttgcatcccacgataaagcggtacttgcatgtttgcttggacatctttcttacgcacttctaacatttggagtacatcttccatttgtttgtagttttctgattcaagcgataagaagcgaccacttttcagacggtgatagctacgtttttcacgcaaagattctaggacattttgaacttcttcttccggaatacctttgaaatcaaacgaaacagaaagataatcgttatcaccagaaacatccagtgtcgttactgggcgcacattctcttctaccatttcttcgagtccgtcttccatataaatctctgcgtactctgctagttttggaatggtgcgatagtaaaattgatataaatctttctcttgtttattgacgaccatttttgttccagaaaaatgaactggggcgctttcgataatattcatcacacgcgcttctttttcgacatcgcgtatcatgattttttcgttttcttcttcagatgttgcaaacggatcgaatagttgattgccataatggtattcaaggcgcaacgtgtgctccccgtattcgagggcaataaataatttgcaatcaagcggttgctgcgtaatccggtcttcaatcgagtcatctagttttaatttgccgcttttttgtaaagcgggtaaaacgtaagaaatgacttcacttaattgtgactccgaaaattgtaccacttcatttttcgttactttatgaaattccatcaatggtttcaacgattcccatacttcttttgccggtatgaaaaaggtaccgtcaaagaaaagaagttggtaggcttcaaaaaagattgcttgttgtaagtcttccatttctagttggtatttatcatctgcactttttttgagttcaaaaatgaaatcaaggttgtcgtggcgcacattgataccgcgatatttaatatcttccacacgttctttcataataatacaagtcgtatcgcgctcagtaagtagttctaacaagtcgctcgccatactcggtggaatcgttaggtttttctcttctgcgtaagatttggaccaataaaaagaatctgtatcatacattttggcaatttcactgatttgcagtagtttatccaaaatttgtttatcttcttcaagaaagaaatgctcatttggatcgtaagcaaaattcttagtgaaaacaagccactgcctgtcgcgaattgctgctaaaaatgtattcatattttttactacgtaggtacgttctgtcccaaccttgacttcaattgtcatgatatagctagaatcatcgggttttaaacggataatatactgcgtttgaagtggcgttttatttgtattgtcctcttccacttcaagttgttgtgccatattttgttgaaaaagggaaagaagtgtatttgattcttgcgtgagaattcgatttttaaaatcttgtttggctgctttttgcttttctttttccatttttaaatgggttgcgtagatgtgtttgcaaatagcgttcaactgaaaatcagcacagctacacgcataattttcattacctgcatcttctacgacattttgatcaataaaatacgttaaaaaatggtctgctgcgtccttttcacgaaactgaatgatttctccgtcttccatcagtttctttccagcctgcttcacactatatgggatcattttattttgaattgctgtaaagtgctccattactttcttcctcccaaaaccgtccattactctaaactactattatataggaaaagacgagggacggcaacgcatgcggtcttttagctactagctgtaataaatttagtggtacttccgtgatttgttgcggttacctccagccttgcggaaattcgttcttttagttctggtacatgggaaataatcccaactaagcgtccgttttcttgtgtttccagtaaacattccaccgcggcttcaagtgattcaggatcaagtgtcccgaatccttcatcaataaacatcgtttcaagtgaaatcccacctgccatttcttgaacaacctctgcgagtgataaagcaagcgctaaagaagttttgaagctttctcctcccgaaagtgtttttacatgtcgagttaatcctgtatactcatcaaaaacttcaagttctaagccactttggacgtttccttttgctttttccattttccgctggagttcaaaacgaccgcttgtcattttggataaacggtggttggcgcggtgaataatcgtgtctaaaaacatcgctaaaatatatcgttcaaaggttaatctccgggcatttttaccacgagctgcatcagctagtaaaccaatgtccgcataattttcttcggcttgttccactgcctgaatactgttttggtagttttcgacaagttcttttctttttgcaacgaattcgcgttgtttcattgtattttcttctgattggctaagttcgagctgtttttctttcatgatgaattctagttgttccatatttggtttttgtttgttttggagtttttcttttaaatcagcttggcgtgatacagctaaatggcgtttttgctcgtattcggccagttttccttctaagttttttagttcatctactgataacaaagcttgtttatacgcatcataggataaaaaatcattttgtttcatggcttctttgaaaatttcgcgctgtacttgtaaggcttctttcgcatccaccgttgttttttgagccgaatgtaacgtagattctagtcttgttgtttctttttctgcctgtctaaacaacgcatcaatctgttcggcttgtttgatatgtgtttcgatttttgagcttagttctttcattttgttatcgaaaacagccttatctcgcaactcgtcgggaatggattgttccaaataagttcgtttcccttccgttagttgcacttgttgatgcaacttttctacttcgagagccatcttatttttttcggttagcgtttcattttgtttgtttttcaatgattctaatgtcgcttggacagtttctttttgagctacttcggattgcaactgggttatttgctctctcagattggtagctagttggatatttccagctaatgtttgttgtatttcggctaaactttgctctttcatatctgcccattcattaagttgccattcgagttgactgatagctttttccgtcgtagtaatcactaattgtttttcttgtagctttgcttttgctatttcgagtgtttcaaggtcagctgtttctccaaattttgcgagtactgggtgtgactgtgaaccacagacaggacaagcatctccctcatgcaaatgcgctgcgattgttgctgcttgttctttttctagttttatttcttcttgtttaatcgttctttccatttccgctttttctattaaaagttgtgctaaggtttgttcttcagtttgtttggctgcgtcccactcctccattttcatccgtttattaactaattcttgttctttctcaaccctggcttctaatgttgtccgtttgttaatagcttctaaatacgtgagctctgctttgtttatttccgctaatcgcgcttcaactgattgcagttctgtagctattttttgttccttgtcgattattttttctaaaagggtcgttgtttctttccaatctaattcggcgcgtcttttttgaatcgagactgtttctaattccaagattttcggttccatttcttctaactggaaaagtgttcgtttgtttatttctaattctgcttctttttcagcgagtgcttctttttgttttttcgcatgtaaaaattgcgttttcacttgttccgcctcaactactacttgtttttctgtttgttcggctgcttctaattgttcttttaaacgaatacaaagtgcatcttgggattgaaggttgcttgctcttttcgcagcattcatgcgaacttccattgattgataaaaatctttctccgcttctagtgtcgcaacttcttctgtatacttatccaaattttgccaatcaagcagttgttctttcgcaagcgtcactttttcgacagcttcacttgtttgtttccgcataatacttaatttattttctaattccgttaaaattacttgttctttttgaatggcctcgtcttgtaacacactgatttcactcgttgtctttccagaaacttccacatccggtaaactaagttcagcaagctctgccacttttttacgcgcttctacaaccaagatttcggcttgtttttgcttttcccatagcaaattttccactttttcatagtaaacagtatgcgctaaccgttgcaatatgacttctttttctttactatccgatacgagcagttctctaaattcgccttgaggaatcatcaaaatttgtctaaactgatccacattaagttgaattaattcttccatttttgtattaacgtcgcgcacggaacttgcaagcaacttcatttcgtcaccaattaactcatataattctgctttttgcggcgaagtggttgttccgtttccgcgttgtttggcaatttcctgctgaggaatacgactaatttggtaaatcttgtctttcaatctaaaagcaagcgttacttcagtaatttctttatctgtcgcaaaatgactccgcatcgaaaaactttcccgatcaaatgtgtttgctttcccaaaaatcgcaaaactaatcgcatcaaaaatagtcgattttcctgccccagttttaccagaaatgacaaaaatctgctctgttccaagcttttcaaaatcaattacttcttttttcgcataggctccgaaagcttgcatcgttaatttaattggtctcattccgcatcctcctttcttgcttgttcaaaaacatccgctaacttttgtttttgtgtttccgttaattctgttccattgacatgttcaaaaaattgaccaaataactctaaatcatcttttttcattatttcttcaaagctatcttgcgtttcttttaatgtttgttttttacgctctaaatgtaaaatatttggataaaattggcgtaatttccccattggatcaattaaagccccttcatccattaaattcacttgaaaaaagtcatcaggattttctactaagttttccgtcagttccgctagtgtcccagaaataatgcgcatatcatgttttggcgttagaaagcgctccgtcacactaattagctctttcccttccagttccacaatccgcacacttttatgatcatttgcttctgaaaatgaatattttaaaggagatccactataaaagatagacgggtggcgaatcgcatgtggatggtgcaagtgcccaagtgcagtatacgtaaaaccatcaaaacaatcagtagaaactcggtccacattcccaattgctagttgtcgttcggaatcactcggaatacctccagaaacaaacgcatgcccaaccaaaatttgcgccttgcttgtatcccatttggaccggatttgtttcgtcacggcttgcatagcgtcttcaaaactgcgaatcgaattatctgcaaaagcttgccgaatgattgctggttcgtgatatgggacaagccatacttcggcatccataaaaggaatcccgtcaaactgcgaagtgcattttcccttcatatatagcttactactttcataccactgacttccaaaagcaagccgctcagcactgtcatgattcccgctgatggcaaatatcggaatacccagttctacattccactttactaaaatatcatttagcactttcaccgcatcagcaggcggcacagcgcggtcatataaatctcccgctaaaataagcgcgtcgacttgttcttcctccgcaatctgtgttatttgagtcaaaatatattcttgctccgctagcatcgatacgccagatacaattttccctaaatgcaaatcagctgtatgtaaaaatttcatcggtttcctcttttctttttctcagagattatttatttttaatgcaaaactcatcaattttaagtatactagatatagtttaaaaaaataactagcaatactgggagtgaagaagttgttttatcatttcgcaaaaaacctcgttcattttattttaattattattggtggacgatttcaagtacaaaacaaagacaaaatcattgaagcaccatatgttgttgtgtccacgcatacgtcatggattgaaatcttataccttggtttcgccctatcgccaacaccagtccattatatggccaaacaagagctattcaaaggtaaatttcttaactggctaatgacacaccttaacgcctttccagtcaatcgtgataaccctggaccgagtgccattaaagcacccatccggatgctaaaatctggtaaagtagttgggattttcccaagtggtactagaaaaacaaccaatcttcatttaaaacgcggtgctgtaactatcgctcataaagcaaaagttcccatgctacctgccgtttatgatggaccaaaaacatttggagaaattttaaaacgcaaaaaaatcattattcgttttggcgatccggtactattcaatgataccgaacttgaccaaaaagagctactagaagttaagtctcaagaattaatggcgacatttgaacaacttcaaaatgaaattaatcaaacaaaaaataaataaaaaagacagcttctttttagaaaccgtctcagacagcaaggaaagtaacatttattttccttgctgtcttttttttagtacatctatttgtttttgtacagctattataatttcaggattatttccccacatatctaaaaaatcagaatctggttcaatcattaacgttaacaaattaattagtttctccaccattttatctagatcttcataatagtcaactggccaaatatatgattttccaagcatttctactatgtatgagaccgctctaatgcgttcataatcatattcattattttcaacttcttctacagtctggatgataaaatcgatatccacatgtttcataaactccccaaaccaatctgccgcttcatcactatcccaaggatcaaaaccccaagcgcccattgcaattcacctctatattactttattttacctattaagcggtatttcttaaacaaaaaaaccgaaataaaagggcttttaactgaaaaatagcaagcaattgttatatcacacacattatatttcgcttttatcttttcaattgatagtcttttatttcggtttctttattatcaggaagctgtatcagttgtaatgcttgaaggattaagtccagcatcttttaatacgctagcaattgcttcgtccgcttttgccatcgcttcgtctgcttttgttgtatcacgaccactagctttaagtgcgtctgcttctaatttgtaagcatcacttaattgtttcacagctgctttgaaatcatctgtggatttaccaaggtctggtgttttttcactagcaagtgcttcagatactttaagtgctgattcactagctggtttcgcaagagctgcaaggtctgcttcagatggtttaggatctgcgccaactgctcctacataagcgttgtaatctccattgttttcattaacaacgtctactaagtccatgtaataatttagtactttgtctttatcgcttgttgtttctttttttgtgtcttcttttttgtcagaactgttagaaccggaacaagccgcaagcgacaatcctagtgctaaagttaaaactactaataaccattttttcaagatgatgtcctcctttttttcaagccaaactcggaagcccttttgtaactggccgcgtcagtctcggatatgcttcacccatccggcaagtaacattactcacgatgtaacattattcattataagctattcatactgaataattcaagctgttttggaaaatgctttcactattattcgtactctccgctaacttctactttattaagctctttttcggtatttttatattggaaatacattacaattcgccacggtacaatcattgcaaatgccattatccaaaacataccagacaactcgcccacttctaaactaccgctaatccagtacttaatgaagattcgaatgagtaacagtcccatcaaaataaccggaaaagcttttgtgcgtttaataaatacatacttgtgacgaatttcgaatttcgttgtccaaattaaaataactgaaaacacaagccccattgctatagcttctaaaatatctacccacgaaacacggaaaaaaggaataacaaacatgagagcgcctgttgacatcataattggcggtatgataatccctttcacacttgctggacgcttcgatgctttcattcttatcatgataattccagctccaaaaacaagtgtaatgataattgaaatgattaatgacacttttaattccccctactaatctgctgtaacacttcgctcctcattatattccttttaccgtttgaaataaacttctctgcttaaagcgcttcgtctaaatccattccactattttgtaattgatacatcgaatgatataccccttcttctgcaatcaaactgtcatgtgtaccacgctcaataattcttcctttggataaaactaaaattaaatcggcatccttaattgtcgaaagtcgatgcgcaatcgcaattgtcgtgcgtccttctcgcattcgttttaaccccgtttgaattaagctttctgtttctgtatcaatatttgccgttgcttcgtctaaaacgagaatttgtggattggttacaaccgttctggcaaatgaaatcagctgtctttgcccacttgaaaacgaagcacctcgctcaatcactttatggttgtactcatcggataatgtttgaataaagccatccgcttgaacaaatttcgcagcatccacaatttgttcatctgtaatgcttttatcgtagaggcgaatatttgtattaatatccccataaaacataaaactatcttgcaaaactaatccagttttcttacgtagttctgtaatttcgtgagacttaatcgacttaccatcaattaaaatatccccacgttcaaattcataaaaacgcatcattaaattgataatggaacttttcccgctcccagtatggccaacaagcgccaccgtttgtccaggttcagccgtaaagctaatatttttaagaacgtcacgcccaccttcataagcaaacgaaacatctttaaactcaattttagcacgcgtgattttcgcctctggatcgtttaattgggctggcacttcttccgtttcatccataatacgaaatactcgggaagccgccgtaatcgcctcttggtacatcgccagccgctccattacgttataaatcgcttctaaaaaacgatcaaagtaactaataaaggcataaatcgtcccaatcgctaccggtcctattaatgactctgcaccaaagaaactaagaataatcactacagccaacgcgtaaatcaaatcaatcgccggtccaagtaatagcgcattaaatttgatatttttcattccgacgtcatagtaatctttattgattttctcaaattcttttactaaacgacgctcttgattaaattgttgaacaatcgacattcctgaaatcgactcagcaatttttgcatttaattgacttaatttttctcgtctcgcccggtaaaattgtgaactgtatttccggtaaacaaaaataataaagacaataagcgggaataaaagtaaactatataacgctaattgaacattgagcgcaaacatcgctgcataaatcccaacgagcataaacaaactttgaatcgctgttgaaagcacattaataaacatatctttcaccgcttcggtatcatttgtcacgcgcgacacaatgcttcctgcaggcgttttgtcgaagtagcgcattcctagcgaatgaagttttgtaaaaatatcaatccgcatttgttgcacaatttcaagcgcgattttttgaaagaacagcaattggaaataccaaacaactgatttcccaatcgtaagtcccaaatatcccgcaccaagaattagcaaagcctgcatttccaaattcatcggtgttaaataatcatccaaaaatattttaatcaagattggtgcaaacacatccgcaagcgttacgagaagaacaagcacaccggtccaaattaaactcggaatatgatatttggtataactaagcattctttttaaaacctcgcgatgttccttaccggacatcactaacatttcatcttgttcattcatcgcttccatctgctacacccccttcttctagcgcttcctccaattgttgctcacggaacatttctgcataccagccatctaacgccattagttccatgtgggttccacgttccacgattcggcctttatcgattacgataattaaattcgcatgttcgactgagctaagtctatgtgcgctgatgatcgttgttttatccgaacgattctcttttaaattagctaaaatttgttcttctgttttcgcatctaccgccgaaagtgcatcatctaaaataagcaattcggggttcataattagtgcacgtgcgatggcaagacgctgcttctgaccaccagagagcgaaaccccacgctcaccaacaatcgtatcatagccattttcaaaaccaagaatatcttcatctacagacacaagttttgcaattttcgtcacttcttcttgcggtgcatctggttttccaaaacgtatattatcccgcaccgttgttgagaataaaaactgatcttgcggcacatagccaattgcttctcgtaaagctcgaaccgtatagtcttgaattttcacgttagcaaaagcaatcttaccttcatacgtatcatattcacgcattaaaagctttaataaagatgtttttccagaaccagttcgaccaacaatacctagtgtttctccagcttttaaattaaaatgaatatctgccaagactggttcactctcatcaggataggtaaatttatccattgtaacttgtaagtccccaactggaaccgtatctagcgcgccctcctggtcaagtacatcttctttttcggcgagtaaatgttgcacacgatcataagaagcattcccgcgttgaataatattgtacaaaaatccaaatgctaacatcggccaaattaataaaaataaatagttcgaaaatgcaatcacttgtccaatagtcaactctccatccacaacgaatttcgcgccaaatcccaatgaaagaacaaatgaaacccccacaataattgaaatcatcggatcaaacatcgcatccactttagcgacggaaatatttttttgaacgacttctttggtttgttttgcaaaatcttgaatatcttctttctcttgtccaaatgttcgtgttacttttataccagaaatactctcttgcgttttatcattcaacatcgaaaaagcggcttgtgctccgtggaaacgatcgtgtaactttttacctaaaatcgaacttccgagtaccataaacggcattggaagtaacgcaatcaaggttaggcgccaatcaatcgttattgccattgtcgcaataaccgttccccctgttagaacagaatctgataaggtcaaaacgccaatccccgctacttgttgaatagctgtaatatcattcgtcgcatgggccattaaatccccagtacgataacgttgaaagaaaaatggcgacatcttggtaaaatgttcaaataatcgtaaacgcaaagtgcgttgtaatttattatcagaaccaaaaattaacatccgccaaacatagcgaccgccgtatgcaagaatcgctgctacaactagaataatcatccatttaatcaatttgtcttttgtcagtgagtcgttcgttacggcatctaccgtatagccaataatttgcggcggaactaactgtaaaagcgcaatcgtgaataaaatggttactccaaatgcataagatttccaattttctttaaaaaaccaacccaatgctttataaattttcaaacaacaatccctcccttttctccttaaaattggacaaataaaaataatggacctatttctgcccattattacccgaaaaaatatatttatttgtcaccactttgtataaaataaaaccaaattaaaggagagttcccttgctcgcgaaatggtccggtgaaataaattctatttttaagcgcaataatgccttgtttgaagtcttcatataattattcatcgtccattcctcctttgttttattatgcaacgttattagtttaaccgattttttttgaaagcgcaacaaataattgcaaattgtttaaaaattatttttattaggcttttttcacgatcaactaatcatataaacagcataacgattcttgtatgaatcgttatgcttaatgactagcttatttaattttcttctggagtaacttgattttcaacagcctcttcatatagttcaaactcttctgtcttgctcacttctttttctgtatctatttttttggttttttcatcgaaagaaatagtggaattcccccctgctacaagtaaagatccatcgtcttgcgtataagcagtaaatatgtagatattgcctacttccgggagttgatcgtcttcaaaaacgtcataagcagatccatcttcccgaattccaccttgtttttgaagtacaatttctttatccattgctaattcattttttaaattcgaaattacttctaccttataatttgtatatgcttcaccaatatatttaattgaatcatcttcttgttcaattggtgtttcatttttgtaatctgttccagtttcttgcgttactttccctacaaacacataatccgcatcgccaacaacttcattcggattatctatatccagtgtataatcggaatgaatagcatatgttggtacttcttttttctcaggtttagtcttttcggcatgcgtgtttacagttaagaaacagccgatacctataatactaattgttgaagcgatgattcccatagttgtttttttcaatttaagtaccccttttaatattttttatatgctgcatcataggattgtttatcattcgtagataaagttgttttggatgtgctatattgatacattacgtcactagaagcattatgcccgagtcgcaagccatgtccaagctcatgtgtagcaacattttgttttccagcattattttttttatccatatttttcttgttaaaagtgattttcccgttactataagtcgttgcattgatattattattcgctgaaatatcactacaatatacgtctgatttattcgctcctgaagctggtctaataaccccttttttataagcattccaagtattagcaccagattgaataaatgacatatactttgaattccccgagtaatctaggtgtttactagaatctactaagtcccagctattgatttttgccgcagcatccgcttcttgtcctggaagtaaaatactccacaaacatacaaatgctactaataatgataaaattttcttcattctacgctctccctctttgtatgtaataattaataaaatgtagcctcaaacatattgtcataaaacaaactactatctttcaaactcactccctttttgtattcacctcactttaaaagatacaatcgcccgtcattttcccgtagtagactgtgattttttattatctttcatcgaacaaaaaaagtgtaacatgaaaatgaaatgtataaccaaaaatgtaatgaaatgtctgtttcatgtcgtgaatgactaaaaagcattcttatttagaattattcttactctttctgaaataactttgcctaaaaaggcgtatttccactcgttttagagcgattattagttttttattcattttatgacatatacttcaccaaatgttcatctaataggaactacccatcaatatttaatacaattatctctctcaatatataaaatattatatttttatcgcataaatattcatgagcggtatattaacttagtaaaacaatggaagccagagcggtgaatccaccccttcttttgtttgaatcattgtccataatgtatccaataaaaataatcttgatgttttttttcatgttgtactccctttgtgttaatatctatttaagtgtagcaaatacggggttaaatcattaatagatttatttcacttggaacaaataataagtttttaaacgcgttgatatgacaatagttctgaagttgtgtgatgtgtactttacaacaatactataataaaaaagacagctaataattttacttagatgtatttaattttttatacatttgggtataatcccattttccttaacaaaggcctaaacataacaaaaatcatatatccaataatgcccccagaaaagttcagtattacatcatcaatatcgacaaacttaaagggtgattgataaataagatcctgtaataattgagcaagttcaatcccgacggttgctataaaacttatagcaaaaacacttttccatcttaattttggataacataatggtaaaagcattccaaggggaacaaacataataatatttgcaactatttgaaaagcagcagattctcttcctgcaataaacatttcacttattgaattaaaaggaattaaattcatataagggcctgttacaaatatttttgtatcttctatcaagaaagcatttaacataaggggaaaaatcgcatacttgattacaccacaagcatatacatataaacatgttttaaagataatcatctctaatttttctcgtcttttcaaccatcttaataagaaaaagacaatatatacaattaaagcgattgtcattactaatccagaaaatctaagcatgttaactctcctaattcttagttactaatggttccttcgattttcactgtgtaccaatccatcgctttttcagcttttaaatagtatttacttgatttcgcatttgcttttgttggaaattcttttgtcttatttttataaaaataattctttcctgaagaaatactgactctgccaaagtaatcatctattccaaatttctctttgtgcaaagttaccgtcgagttggggttactattcccgaaacctttagccgaaacgttcaatttaaccgttcctttgttcaatgaatgatattttccatttgtagcaccatttacagctcgacggttcatcgaaatggctactttattacttgctgcatagactgtaatgattggggttgctataatgcttatacctacaatgaaagccattagtccttttaataatctcatctttctgttcatcttgttgcctcctttttgtaatcaatagttgcaatgcaagagtatcataaaaaagcgatgtataaccaaaaatgtaatgaaatgtccgattcttgtcgtgaacgactagaaaatggagcttatttagagatattcttacacaacgtgagtatcattaagttttttggtcataagataatactcattatgagttactattcacattttaaacattcctgtttctatttatcacaaaaaatacatatcaatccaagatatgcgttatttcacttatgaatattccttatttatttaattatttatcagttttatttattactaggtgaataatatagtataattattcacctacgacagacgagacacgagaaaaattaatgaatacgatgaaagacagattgtcaggaatctagaaaattgtgggataaaaattaaatataaaaatatcccacaaaaaatcccacaataatttgatattgtatgatattcaaatgaaatcaaaaaaatcaaaaccccgcatttcctaagaaaatacggggttttgatatcatataaaatcgatttaaaatggacttattttttcacttggctcattacttcttcaacaaagttatcttcttttttctcgattccttcgcctacttcgaaacgtacgaatgatacaactttgccaccgctttgtttcacatattcacctacagtgatgtctggatttttaacgaaaggttggtcttctaaggaaatttcgcttagatattttttcaaacggccttctaccattttttcaacgatattagctggtttgccttcgtttaatgcttgttgagttaatacttctttttcgtgtgcaacttcttcagaagaaacatcttcacgagaaatgtatttagggttgattgcagcaatgtgcattgcaacgtcttttgcaacagtagtatcagtagttccttcaagaagtgtaagaacaccaatacgtccgttcatgtggatgtattcaccgaaagcagagttgtctgctttttcttttacttcaaaacgccgaagggaaatgttttcaccgatttttgtaattgcttcagtgatgtaatcttgaacagtttggccattaggcatttctgttttaagtgcgtcttctaaactatctggacgaactgcaagaatttgtttagctaaagcgtcaactaattgttggaagttatcgtttttagcaacgaaatctgtttcagcattaacttcaagtactacggcatgtttttcattgctgattacatgagtcataccttcagaagctacacgatcagattttttcgcagctttagcgattcctttttcacgaagatagtcaattgctttttccatatctccttctgtttctacaagtgcttttttacaatccatcataccagcaccagttttttcacgtaattcttttaccatttgagctgtaatgttagccatttattttccctccaatttttctctttaaaaaaggtgataagaatagtgccttatcaccttgaaagtttcaaataaaatcttatgcttcagtagtttcttctgtagctttttcttctacaggagcaacttccgcttccgttaactcttccccttggttcacttcaatgatagcgtcagccattttagcagttaaaagtttaaccgcgcggatagcgtcatcatttgcagggattacgtagtcgatttcatccggatcacagtttgtatcaacaataccgatgataggaatatgaagtttacgagcttctgcaaccgcaatacgttctttgcgtgggtcaacgatgaataatgcatcaggaagacctttcatgtctttgattccgcctaagaagcgttctaatttttcttgttcttttttaagaaggacaacttcttttttaggaaggacttcaaaagttccatctgcttccattctttcgatttttttaaggtgttgaatacgtttttgaatagtttcaaagttagttaaagtaccacctaaccaacgatgattcacgaaatattgtccagaacggatagcttcgtcgcgaacggattcttgagcttgttttttagttcctacgaacaggatagttccgttgtcgctagctacttcacgcatgaagttgaaagcttcgtctacttttttcactgttttttgtaggtcaatgatataaataccatttctttctgtgaagatatatttcttcatttttgggttccaacggcgagtttggtgaccgaagtgaactcctgcttcgagtaattgtttcattgaaataacaggcatgtgttattccctcctattggtttattttttgcggataaccgccctccgcatggatcaaccagctgaaaaacttaagcgaacaagtcgttaagcaccttctcagtctgtcaccgtgcgtgtgtgatttaacactaacaataaatatagcataatttaatgagttatgcaaccacaacaatacattgtcgtgatttttttaaaaattatttatgagttgattcacaaataatttgttggagagtagtgataatttacttcatttttattttaacaaaaaatagtatgtaattatgtagtaattgcatttaatatttacacacattgtgcacaaatgcacaatatataaaaaaatgttaaacttaccctacattataagcaaggaggtgaatatcctatgattacgtactattttaataacaaggccgatgacaaaggtaggcacgaggtacatgaaagaacttgtagatatcttcctgaaaacaaaacagaaattggtgtcttttcatcatgccaagatgctataagacaagcaaaattgcaacattttcagaaagagtttgatggttgtttttggtgctctcgctcttgtcataagggataataaaaaaggggcagtttttctgctccttcctattaaacctttgacttccattggatgaaccttgaaataattagcttttaatttcgaaattcctaagatatatgtctaatttattaaatctagttctttatagtataatttaaggtcacattatcatttttatagaaatcattattaatagaattttaaaagtagactatatttaatctgatgttaaatgaaaattgtacttaactccaaaattgggttaatctgcattataagtttgatttcgtactagatttagattaaacatatttctaaaaaaactgccagccagaagccagcagtttccattattagttcgcaacaatatttacaagtttccctggaacgacaatcactttacggattgttttgccttctaggttttctttcattttgttgtcttcttgtgcaattttttctagttcttcttttcctagagatttggcaacagtgattttgctttttactttgccgtttacttgaagtacgatttctacttcatcttctactagttttgtttcgtcgtatgttggccaagctacatagctgattgtttcggtgtgacctaggatttcccataattcttctgcaaggtgtggtgcgattggtgacaagagttgaacgaaaccttcgacatattgttttggaattgtatcttgtttatatgcttcattgatgaaaatcatcagttgcgaaatcccggtattgaaacgcaggttttcgtaatgattcgtaactgttttcaccatatgatgatacgctttttctaaattagcattcgcatcagttgtcactttttcagcgagtgtgccttcttcagttactagcaaacgccaaatacggtctaagaatttacgcgcaccttctagtccattttcattccaagcaatcgaagcttcgagtggtcccatgaacatttcatacaagcgaagtgtgtctgcgccgtatttttctactacttcatcagggttaacgacattgcctcttgatttggacattttttcgttattttcaccaagaatcattccttggttaaacagtttttggaaaggttcttttgttggaactacaccgatatcgtacaagaatttatgccagaaacgtgcgtaaagaagatgaagcacagcatgctctgccccgccgatataaacgtcaactggaagccattctgctagtttttctttgtcagcaattgcttcgctgttttttggatcgatatagcgcaagaaataccagcttgagccagcccattgtggcatggtatttgtttcacgacgacctttacgtccattttcgtctgttacgtttacccaatcatgcaagttggcaagtggtgattcgcctgttcctgatggtttgatttctgttgcttttggcagaagtagtggtagttcttcttctggtacaagcgttgtttccccgtcttcccagtggataactggaattggttcaccccaataacgttgtctactgaacaaccagtcgcgcaaacgatacgtgattttacggctaccgatgccttctttttctagccaatcaattgcagcggtaatcgcttcggctttagctagtccgttcaagaaatcggagttaatatgtggtccatcgccagtgaatgcttcttttgtaacgtcgccgccttcaagaacaggacgaatattcaaaccaaattgttgcgcaaattcaaagtcgcgttcatcatgggctggtacggccataattgcgcccgttccatattgaatcaacacgtagtccgcaatccaaattggcacttcttcgccattgattggattaattgcgtaagctcctgtgaagacacctgttttatcttttgcaaggtcggttctttctagttcgctttttagttctacttgttttttatatgcttcaactgcttctttttgttcaggtgttgtgattttttcgataagttcgtgttctggtgcaaaaactgtataggttgccccaaaaagtgtatccggacgtgttgtaaagacgttaaacgtttcatcgctatctttaattttaaaagtaacttctgctccttctgaacgaccaatccagttacgttgcatatctttaatattttcaggccaatccactagatcaagatcatctagcaaacgatctgcgtacgcggtaattttaagcatccattgacgcattggtttacggaaaaccgggaagccaccgcgttcacttttgccatcgataacttcttcattggctaaaactgtaccaagtgccggacaccagtttacagcgatttcggcttcataagctaggccattttcatatagtttttcaaaaatccactgtgtccatttataatattcaggatccgttgtattgatttcacgatcccaatcgtaggaaaaaccaagtgatttaatttggcgagtaaagttcgcaatattcagcgcggtgaattcttctgggtcattcccagtatcaatcgcatattgctctgcaggaagtccaaaggcatcccaaccaattggatgaaggacgtttttcccttgcatccgtttcatacgagacaaaatatcagttgctgtataaccttctggatgtcctacgtgaagacctgctccagacgggtaaggaaacatatcaagtgcatagaaattttctttatttttatcttcggttgttttgaaagtgttgtgttcactccaatattgttgccatttcggttccatttttttatgattaaatgtcactttactcatcctcttttccttaaaatatcgaattttggctacaaaaaaatccctacatcccaacggcttatcgccatgggacgagagatgcttctcccgcggtaccacccacattagtgtttgaccactcaacttatcaattccttaacgcggaaaacggggatacacccaagctccatggtaagttcatccagattttgtgactgacttgcaccaaccgtcagctctcttcacatcaaaatatgcagattactactccaattcatcgctatttcgcaaaattcattagttttattgtagctgaatttcatttttttagcaagcgctctgaagatttatctaactttcctaacaaaatgtgctaaaatgaatggagaatttcatttgaaggagtctaaaactagtgaaacaaacgaatccatttgtatatagtaatgataataaaagatatcatacatggaactactgcttaagagaagaatttgggcaaaagacttacaaagtggcgcttgatggcggctttgattgtccaaatcgtgacggtactgtagcgcatggtggttgtacattttgtagcgcggctggttctggggacttcgctggcaaccgggcgcttgatttaaaaatacaattccagcaagttcgcgacaaaatgcaaacgaaatggaaagacgggaaatgtatcgcttatttccaagctttcacgaatacacatgcaccggttgccgaattgcgcgaaaaatttgaaacagttttgaatgagcctggtgtggttggactttcgattgcgacacggcctgactgtttgccagatgatgtggtggaatatttagctgagttgaatgaacgtacttatttatggttggagcttggtttacaatccgcccatgatgaaactgggcgattaattaaccgggcgcatgattatgattgttatgtagaaggtgtgcgtaaactgcaaaagcataatatccgcatttgtactcacattattaacggtcttccgaaagaaacgccggaaatgatgatggaaacaacgcggaaagtagtagaaagtggcgttgatggtattaaaattcacttacttcatttattaaaaggaacgccgatggtagaagattataaaaaaggtgacttagaatttttaacgcgtgatggttatgtgaacttagtagctgatcaactcgaaatcttacctcctgaaatggtcattcaccgaattacaggtgatggtggcgtagatgacttaattgggccagtttggagtttgaataaatttgaagttctgaatgcgattgatgcggaattggtacgcagagatagctggcaagggaaattgtatcaacctgtggaagtgaatgcaaaatgaatttgcgcggaattctccccttcgcccatgatacgctccgaaaagtagttcgttctggagattacgtggtggatgcgacttgtggtaatgggcatgatacgcttctgctagcagaactagtcggcatcaatggacatgtgcttggatttgatattcagcaactggcgattgatgcgacgaacactcggttagaaaacgcgggtgtcagttcgcaagtagaactcgtatgcgctagccatgcgcgcattccggaatatacatccaaaccggttcgcgccgctatttttaatcttggctatttaccaggtggcgacaaagaaattacaacaaccgctgattcgacgctagaaagcattggtcatttaatggagctgctcgaagttggtggcgtcattattcttgttatttatcacggccaccctgctggaaagcaagaaaaagatgctgtcatgactttttgcgaagctatcccgcaacaagattttcacgtattatcttacaactttattaatcaaaaaaatgatgccccgttcgttattatcatcgaaaaaagaaaacctagacaaagctagtaattagccagtctaggttttcttttattttccaaaatcgtatttgtctgctacgtatacatcgtaccaaatcatgaaaataacgactgtccagattttacgactgtagtcgaatttaccggcacagtgatcgtctagtaagtctagcacgtattgtttgttaattaaatgatcggttggtgattctttaatgatatttttaacccaagcgttcatttcgtcttttaaccagtgacgaattggtactgggaatcctagtttacggcgattaagtacatgttctggtacaaatgttgctgccgctttacgtaagatatatttagtagttccattagttgttttcattgtatctggaatatttcttgccacgttgtacacttctttatcaaggaaaggtacacggacttccagcgaattagccatcgtcatgcggtcagctttgagaagaatatctccgcgaagccacgtatgaatatcaatgtactgcattctttctacaggatgataattcgttgtttctgcataaaatggatctgtaatattcgtatagtcatgaccagcttgatattttggaagtaaaatttgtttttctttttccgtgaacattttggcgtttccgatataacgttcttccatcggcgttgttccacgttctaagaaacttttaccacgcattccttctggcataatacgcgccaagttatttaacattgatttaaatacgcctggcattttgttaaacattgcaagggaatttggttcgttataaatgttataaccaccgaaaagttcatctgcgccttcacctgataatgctacggttacttgtttgcgcgcttctcttgataagaaataaagcggaatagcagccgggtcagcaagtggatcatccatgtgccaaacaattttcggtagttctttcatatattcttctggtgagataacataactaatgttttctacgccaagtttgtccgctgtttcttttgctacatcgatttcactgaaaccatcgcgttcaaaaccaactgagaatgttttgattgctgggtggtattctttggcaattgctgcaataatcgatgaatcaataccgccagataggaatgaaccaactggcacatcagagcgcatgtgcattttaacagaatcatacatcacgtcacgcacttctttaatccatgcgtcttctgatttagttactggtgcaaaagatgctttccaataagtcgtaatttccatcggttgaccaatttttttcgtaaactgatgtcctggctctaaacgtttgacatttttagttaaggaatctggttctggaacaaattggtaagtcatatagttttgtaatgacacttcgtccaattctttttcttttaacgcatgtaaaatggatttcttttcagaacccatgaacagcttgtcgtcttcttctgcatagaaaaatggtttaatgccgaatgggtcgcgtgcgccgtaaacaagttcttcttgtttgtcccaaataacaaaaccaaacatcccgcgaaggcgttctgctgttttttctttgtatttcgcatatgtagcgataattacttcggtatcactttcggtttcaaatgtcattccttcagcaactaattgctcgcggagttccacatagttataaacttctccattaaaaataatccagtaacgttcattttcatacgttaacggttgatgaccgttttctacatcaataatacttaaacggcggaaaccaaactgcacgtgatcatctgtgaagtatccttcatcatctggcccacggtgcgtaatcatactgttcatttgtctaaaggtttctttatcagcgccagtaatttctgtaatgcggtcatgtacgcatcctacaaatccacacatggtaacatttctcctctatatagataatcattttatctttttttcacaacgtctatcatatcataactagactttctttgcactgtttaggaaagaaaaaaaccgaacatttctgagatgaaatgctcggttaggcttattttacgattaattttttcaatgcctcagctttgtcggttctttcccaaggtaaatcaagatcgctacggccaaaatgaccaaaggcagctgtttgacgataaattgggcgacgcaggtctagcatatggataatgccagctgggcgtaaatcaaataatgcatttacgccatcaattaattcttgttcggaataatcacttgttccatatgtgtcgatagagatagaaactggacgagcaactccaatcgcataagcaacttgtacttctacttttttagcaagtcctgcagcaacgatatttttggcaacatatcttgcagcataagcgcccgatcggtctactttggtcggatctttaccggagaacgctcccccgccatgacgtgcataaccaccgtatgtatccacgatgattttacggccagttaaaccagcatcaccaagtgggccaccgataacaaagcggccagttgggttgataaagtatttcgtatcttcatctaagaaagaagcatcaatcacttctgggaaaagatacgtgtgcaagtctttcgcaatttgttcttgtgtgatatcaggatgatgttgagttgaaacaacaatcgtatcaatccgaacaggttgattaaactcatcatattctactgttacttgcgtttttgcatccgggcgcaagtaatctaatttatttgttttgcgtaactcggttaatttgcgagctaaaccatgcgctaagaaaatgggtaatggcattaattcttccgtttcgtctgttgcaaaaccgaacattaacccttgatctcccgctccgattgcttcaatagcagcgtcaatttcgttgccacttctggattctaacgcttcgtctacgccttgtgcgatatctggtgactgctcatcaattgccgttaaaacagcgcatgtttctgcatcaaagccatatttcgcacgggtatagccgatttctttaatagtatcgcgaacgattttagggatgtcgacataaacagaggtcgtaatctcacctgctactaatactaaacccgttgtcacagtggtctcacaagcgacacgcgcgtcgggatcttttgaaataattgcatctaaaattgcatcagatatttgatctgcaattttatctggatgtccatcagaaaccgattctgatgtaaatagatgacggttcttagccaattttattttcctccttcaattctctccaaatacgtctcatataaaaagcctctctctattttgcacaaaacgcgcacgaatagagaaaggctataattatacctttgctctcatcgttcagaagataatactcctgcaacagattagcacctttcacttatatgtgtaggttgctgggcttcaaagggtcagtccctctaccgctctggataagagataaattttaattctaagatagaataccataaactggtgtcagatgcaataataattcggttatgtgttatgataaagcagtcatctacccgctaaaaatggccgaaaattgccttccttcattttttcacttatcattatttccaacctgtggtatgatagatggataaaaaagatgttttacttaactaaaggagattgtatctatgagtttaattccactatccttgattatttttcttgggtttttagcagttttatgtttatttgattttgtttttcgtttatattggtttaaatatttcctagcaactatgggactaattgcaagtggtgtggtatttttcattagtttttacggcggcgggatgtcccaaacagaaatagctattgccattttcatcggttcatttggtgaatatgttgtatctcttattattagcctcgttcgttttatttccagaaagtcaaaaaaacctaaacaaaagaaaaaagctaagacagcctaaaaagctagcgacaaatttgtcgctagctttttttatttgcgtctaataagaacgagtgaagtagctaaaaggaacataccaacgataactggaatagttgattttgtatcacctaatgctgggatgctttcatttgtagccgtagtattttgcttggtaggatttaccgttatatcggtgttactaccatttgtcccattgctgccattcgtattatttccgccatcatctggtgtcggtggtttaggcggcgtcaccttctcttctactgtaagacttacatcgattgttttagctttattcccgtctgcatctactgcatttaagtggatagtatattttcctggcgtttttaacatattcgggtcaaaatctgtcgtgattttagaaccatcgtccgtggtagcatgaatgtcttgtaaaaattccgttactgtcttaaccgttccgaccgggtaactaatttttttatctgccttaattattggtgcagttgtatcttttacatgaatagttatttctaccggtattgcttgattgccagcagcgtcaacagcgtatagatgaactaaataatctcctgatgtgttgacaattgccgggttataatcagttgttattttggagccatcatctgtattggcgccaatttttgcgagtagttgttgttcggtcattggcgtgccacgttcggccgttatttctcggctggttgtttttataaccggagcgatagtatcttggactagcacattaattttaagtggcaatgctttgtttccactttgatccgttgctcggagtaagacttcataattcccggtttttgttagatcaattttcgaaaaatcagagctgattgggctattgtcgcttgttgcggctttaatatctgtgtagaaagcttgctctgtttttgtaatgcctctttcgtaagtgattgattggtcggctgtaatgattggagggatggtatcctctacttttattgtcacttttacgggtgttgctttattgccacttgcatcctctgcatttaatgtgacgatataggttccaaccgtatcaagatctttactattaaaatccgttgtgattgtagatccatcatctgtagttgcctcaatatctgctaagaaatcagcttcgtttttattgatagttctttcataggtgattgcatttaatgcattgataatcggtccttttgtatctaccactgtaatcgtaacagttaccggatctgcttcattgttgctctcatcttttgcatttaatacgactgtgtaggttccttcttgcgcaagaacggttgggtcaaaattactaatgatggttgatccatcattagttgtagcatgaatatctgttaaaaattgtgcgacagttttggttgtcccttttgcgtaggttatggttgtgtctgctgtgataattggtttttctgtatcagcaacggtcacagtaatagtgactgggtctgctttattgccactttcatcttctgaattcagtgttaccgtataagttcctgccgtgtccagatttacggctgtgtcaaaatcacttgtaaccggagtgccgtcatctgttttaatagctaaatcaaggaagaagcctgtttcttgtttcttttctcctcgctcataggtaatgcttgttgcgctggatgagattactggtttttgtgtatcttgaacaacgacggttacttttactggcaaagcatagttaccattttcatcaacagaacttaatgttacttgataagtccctacttgcttcaaactaattgggttgaagttagaagttactgctgaaccgtcattcgttgttgcatttacatccgttaaaaaggcagctgcagtcttcgtggttcctttttcgtatgtgatagttgtatctgctgtaataactggtggggttgtatcacgtacggtaactgttatggtgactggatcggatatattaccacctgtgtcggtagagctaagtgtcacatcgtaatccccgggtgtatttaaatctactacagttgcaaaattagaagttattgctgagccatcgtttgtagtagcatggatatccgttaagaaatcagtagcagatttggttatgcctttttcgtaaataatggcttcatcagcagtgattactggtgcggtcacatcttttattgtgacatttactgttcttgggattgcttggtttccactaatatcgtttgcctttaatgtgactgcgtagactcccggtgtgtcaaatttcacttgatccgcaaaatcacttgtaatcgttgctggttcatctgtcgttgcatgaatatcagtcaggaatagtgcttctgttcgtatatttccttgattataactaatcgcttcatctgcacttataatcggcgctaccgtatcttccactgttacgatgacataaatgggatcagattggttaccagctgcatcggtagcttccactaaaaccgtataatcacctggcgaatccattctcaccatcgtatcaaaattggttttaatcaccgcgccggcttctgtttttacatttacatcgtttaaaaattcctcttccgttttctttgtatttatttcatacgtgatcttgtcgtcagctgtcacaactggcgcttgtctgtctactgtgaacgctttttctgaagcttctgatgtatgaccaattctgtcagccgctgatactgacaatgtataatttccatcatttaatgtagagagatcaattggaactggggtttgaactcgaatggtagcaccactctcttccacaccttgctggataataagtccatttgcatctttaattgcccagttgattttatacactcctgcgccattaatatcatcttccgcaacgacaagagcggttgttggattgtacggtttcatgtttacagaaataactttcggacttccaacatcaactacagcaacacttactttcacatctttcgctgtatatccactcgccgggtcaagtgatgcagtcacataataaacacctggcgcattccagtcaactgggttttcagggtcttctgttagtttaacgtacttaggatcgatggacacgctatccattgtttctgcataaatatgaaaatgcccttcatttcgaacatctgttaaggatgtatactttccagctgctagagctacactcgtcacatcgattactgcagtttcgtcagcagtcgaagtcataagtgtaatttccttattaattacagctgttttcgttccttctgttcgcttaattgaagcatctacagttattttctcatcatctactgcggtaactacataagtcacattattagcactatctaaaccattaaatgcatgaatagcatttgcagggactacttcgccaactttaaaagccccatggctatctgcgtagcttttctctagttttggagtctcaagtgggtgaatcaattggacatttcgcgtaccagtggttttattaccacttcctggcaaatattcaatttgataaagttgctgttgtacgcctacagtatataaatcaaacgtattttttgtaatagattttgttacatcagatgaatcaattccagagtacgctttcaccccttctagttcatcaaaatctgcacgacgttccccttggtaaaatgctaagattggattacctgtatctagtactggagctggttgcaaattaaattctgcaaatatcatcgccccattcgggttcacatcataggtgttaggatattctacattttggatatatccatcattatttaatccatcgtagctaaagaaaccatctactttattgccgacgccattaataatagttgtcaatgaattatgttgattcgttcttaaaatctggctatccgttacgttcaaatcatttccaagcgctaaataatatccgttatttttgtttaatggctcactaccaaaaatgctttcttccgcgtgtgtactaccacctaaaagcagaccttttccttcactgtaaatcacactatttagcgtcgtggaggagttcatcgtcatttttttagtctcaactacttgttctgacgcgatattaacaagcgcgatataccaggtagtgggtgttgacatgaccacaaacacattcccatcgccacgatcttccataaatatataaggggaagagtttgctaaaatttcaggaacagaatcaaacaatgtaatttctttataattattttctgattcacgaatggacattttaagttggttggcaccatttacatccgcgttataagccatcagacctttattatctactttaaggacatctgtccgttgatatttggcccagaaagtattatctaatgggttaaattcattttttgtaatggataatgaggctggttctaaagtataacgaataaactgtttaccttgcgcagcataccgagctgaagctgacatggttaatgtattaccttccatttgaatatccataaaataggcataggttagatctgatcttgatggaacaccgtaactaacgtatgatttatgggctatttggaagttaccatttgcatcaattgattttacaattaaagtactacctccacctgagtctccgtagtaattgactacttccccaccaacataaaaagtcgatttactcgagttggttgtaatcgatttatacgaactaaaccatttgtcagctgcatattgtgaattgtaattaccgtcctcatagttaacaacacgtgcccactccactttttttgtggttcgatcgacacgcataataatcccttgatcacggtttggaattttatttaattgcccattttcatttaaaatgggggttccttgtatgtattgaccttgcactgttccaatcaaaataatatcgccatctgaggttaactcaaaatcctcatcaatcgataatttcccgttattttgatcactaatcgacatatccacctcaaaattaggcaaaactttcccttctgcagattgaaagcgattatctgaaatctccggtgaaatatcatctggagaaatatctcccaccgattttgcttctgctttcattccagtaagacaaattaatgatagcaaaaaagtcatcatgcctataaaaaatttacttttcattcatccccatctcccttttttaaaagtcccccaattattttatccccattcctaaagctattgtcatgttattcccctattttatctatgacaaacttgatactaaattaattgaaaagcatttttaatgatttctgctgattcattaaaattgatcttctctgtttctgttaaaggtggctctaaaatatcaattacaccatttgcaccaatgagtgctggctgaccaatgtatgtgcttgttttttctgaaaatacagctaatgggaaaacttgtttagcatctgttaaaatcgcatcgacaatccccgctacggctgtggctattccaaaactcgtccagccttttcccgttaagatattccaaccacccccgcgaaccgcgtcttttaatgcgggtaaatcaagagaggtcgttgttttataatctttgatacttacaccaccaattttcaccgtagaccaagcaacgaattgtgattcaccatgctcaccaagaacatatccttccacgctctttggattaatatgtaatgcttctcctactacccgcctcattcttgctgtatcaagtgatgttcccgtcccaaatacccgtgaatgatcaaaaccagataatttctgaataagcatcgtaatcacatcgcacggatttgtaatattcacaaaaatcccttgaaaccccgatgcgataatttttggtacaatctcagctaccgaccggcttgtttcaacgagttcttccatacggtcttctcgtagtaatgtttctggaccaacagccataacaataacatccgcatcacctagtgcgctccagtcgttcgaagtaatcattgtataagaattcgtcatcgaagccatatcacgcagttctagtgcttcactttctgctttggtttcgattttatctattaacacaatttcatcacaaatcccttgagtaacaagggaaaaagccacgtcgctcccaacatgaccagtaccaattattccaaccttccgtttcaaaaaatcccctccacaattaattacttgaatttaatgcaattaattcatatttaatgatagttttattattttcccaaacgagtttacgagggatcgcttctccaagtgtttcgccttcttttgttttacgtactgcgattggcacatcaattggataaatacgataacctaatttttccagttcaaagaaattatcagaaattcgcttttcttttccttttgttacaatcattgtgtttacctctagtggcatacccaattttcccacctccagtttctttaatcatagcagagattgccctcatttgactagtttttatcatttaaaatatgttctgcttgttgcacaatttggatcattccagcatctcgcataaaaaagctaaaagccggttgtaaaataaattggcttaactccccttgaatgatgacaggccctttcgtttcaaggtaatcatctagtgattcgatggaaataacatgcgccgcataaactcgtttagtaaacgttcgttcctctgattcgactaaataatcggctacaaaatgaagttccgcactaatcgcccccgtctcttccatgagctcgcgtttcgctgcgtctaaatttgtttctcctggttcgccttttcccccaggaaattcaagtccacggattttatgttcggtaaaaagccaaccatcctttgttttaggtataatgagcacatcgtccggattattttcctgtgcttcaaaatagattgtaactttgtttccaagtgtatcaatataaataaacaaaaactcacttccttttcttttttcaaaaatgtggtaagctgtatgtaagctgaaatttagaggatgaatatcaatgaaaaaaattcttatcggaggaatccgactttatcaaaaatatatttcgcggttcaccccggctacttgtcgcttttacccgacttgttctgcttacgggattgaagcgatacagacacacggtgccctaaaaggaagttaccttgcaattagacgtatttctaaatgccacccgtttcataaaggtgggctggattttgtgccacctaaaaaagataaaaacgctgattccgagcattcttgtaaagtccatcaccatcattaatcatatcatgaatcggtttttaccggttcatttttttcttgctttttaagccagaataaggtattatcaaattcggactataaatcgtaattgctacgattcgtatattatttaaacaagaattatttcgatttagaggagtgaacagattgagaaaaaggtatcttattgctttaactacattattttccgtattattaatacttactggttgctcagacgagagcgacacaaaagcgacatcgagtgaccaattaaccgtctatacaaccgtttacccgctgcaatatttaacagaacaaattggaggtaaatatgtggatgttcacagcatttatccgcctggttctgatgcacatagcttcgaacctacccaaaaagatatgatgaaaattgccgatagcgatttattcttctatatcggtcttggtatggaaggatttgtggacaaagcgaaaaaaactctcgcgaatgagcatgttaccttcgtcccaaccgctgaaaaattagacttgccaaaagatccagatgcagcagaagagcatgaccatgaaagcgaagaagaacatgaacacggcgacatcaacccgcacgtctggttaaatcccgtctacatggaacaaatggcaacagtcgtaaaagataaattaatcaaagaaatgcctaatcaaaaagaaactttcgaaaaaaattatcaagctgttgaagaaaaattaaaaaacttggatcaagatttccgcacagttacaagtgaagcaaaacaaaaagattttgttacagcacacgcagcctatagctactgggaaacagaatacggcttgcaccaaattcctattgccggtgtatcaacaagtgatgaaccttctcaaaagaaattaaaatctatcgttgaaaaaatcgaagctgagaagatcccatatattatgttggaacaaaatactaattcaaaaatagcagatgttattcaacaagaaaccaatacaaaaacactgacactccacaatctagaaacacttacacaaaaagacatagagcaaaaacgtgattatttttccattatgaatgataatttaaaagctttaaaagaaggtcttaattattaaaaaagaaaggcgctctatttacttagagtgcctttcttttagtttattgcgttgaattttgccagatgctgttttgggtagtttctcgacgatgattatttgtttagggattttataactagccaagtttgtttggcagataagctgtaattcatcttcatcaaatgtttcttccgcaacgataaaagcaacgggaacactaccccatttatcgtcaggctgaccaataacagcaacttccttcacggctacatattcgccaataacatgttcaatttcagttggatatatattctcgcctcctgaaataatcaagtcagaacgacgctctacaacaaataaaaagccttcttcatccaaatagccaatatcaccagttttaaaccaaccatccacaaatgaagcttccgtcgcttttttattgtgtaaatatccaggtgtaatggagggcccttttagcaaaatttctccgtcatccgcaattttcacttctgctggaaataacgctttaccagaagatccgattttatttaaggcatctttcggtggcaaagtaacgatttgtgaagctgtttctgtcataccaaatgactgcactaagggaatgtcacgctgtttgcaaatttccaaaacggttttactagcaggtccgccgcccagcaaaatggttcgtacattcggatgataactgccaccatgtattttcaacaatcgttccaacatagaagtcacaaccgatatcgtggaaactttaccactttcaagcaattgcgtgattttttcttcatcgaaatgctcttccaaatatacgggaattccgtaaatcaccgaacgcatcataatcgataagccgctaatatggaaaatcggaacagcacagagccagctatctttctctgttaaacctaaatttagcacagaggcaactgcgctccaccagtgattctcataagtctgtatgacaccttttggcttacccgtggtccctgacgtatacataatggaagctgtgcgtgataaatcccaagtttcaagtaattctggctctttataatctgtttccgctaattcagaataacttattccagcccctaccttatcttcaaaagtatccgccacaatcacttgttttacttcagcgttcgcaagttgatatgctatctcttttttcgtcaaacgattattcagaaataaagtgaccgcaccgagttgttgcagcgcatgaatgagcaaaaacgtcatccgatcattctttccaagcaatgcaatcatctcgtcttttctaatgcctaatgcgaataatttacccgcaagtcgctctactgcttcacttatttcttcaaatgtttcttcttttccttcaaaaacgagtgcggtctctttaggagaaagccgcactcgtttttgaagccagtttgtcatgtccatttttacaccttcaaatcaagggaattttggaaattggtcaaagtctggatcacgtttttctttaaaggcatcgcgaccttctttggcttcatcggttgtgtagtatagaagtgttgcgtcaccagctaattgctgaatacccgctaaaccgtctgtatctgcattgaaagctgctttaataaaacgaagcgcagttggacttttttgtaacatttcttttgcccaagctactgtttctttttctaaatctgctacaggaacaactgtgttaatccagcccatttcaagtgcttcgtccgctgtatattgacggcacatgaaccaaacttctttcgctttcttatgtccgataacacgtgctaaatagccagaaccataaccagcatcaaagctaccaacattcggtcctgtttgaccaaatttcgcattatctgctgcaattgttaagtcacatactaattgaagcacattacctccaccaattgaccagcctgcaaccatcgcgataactggtttgggaataacgcgaattaaacgttgtaaatcaagaacgttcaagcgtgggatttggtcatcgccaacataaccaccatgaccgcgtactttttggtctccgccagaacagaaagctttttcgccttcccctgttaaaataatcacgccaagatttgaattatcacgcgctaagttaaatgcatcaatcatctctgttactgtttttggtgtaaatgcattatgtacttctggacgattaatcgtaattttcgcgattccttcgtaactttcatatttgatttcctcatatactttttctgtttgccaattaaaactcatttttcttcctccttcaaaatatcttccagccagtaattaagctgacttgaaaagctgtttggttgttctaaataaactgcatgccccgcttcttgaattgaaacatgcgtactatttggtaaaagttgatgcatttcctgcgcgattttttcaaacttctcatctaaagcaccggtaatgagtagcactggaaaagtaaagtttgctaaacagttccagtaagatggttgttttccggtccccatcccacgtagactcattgctaaaccatgcgagttttgcgatagccgttctgacctaattcttcttttcatttcaggagacaaaactttttgtgaagcaaacaaagctaaattttcccagtagtccacaaaaggcaccaagccctcttcttcaatccagtctgccaaacgattatcagcctcgacacgacttgcgcggatatcttcttgttcaaggccaggagagctactaactaaaataagtccacgcaccctttttggaaaggttgctgcaaacgcagtcgcgacccgcccgcccatcgaatagccaagtacaaaacatctactgacatttaattgatgtaaaattccagctaaatcctcgcaaatattttccattgtgtaagacgatatttcttctgggcttgcggtatttccgtgcccaagtaaatctggcgcaataatattaaagcgtttttttaaacccgaaatactatcttgaaatgtttcgcttgttccagtaaaaccatgtaacatcagtaaagctggcttttctccacttatagcagctgtcaggtgataatgttgaccgtttactagcatattaatttaatgccttcaacgcgtccgcaattttagcccaaagcgcttgatgatttgctttattttcatgacgatttgttttcacttcaataatatccaaacctttgtggtagctagctttatcaattgcttcttctagttcatctaccgattgggtctcgtgataatctgcatcataaaaagcagctgcaaaacggaaatcaagttcagttgatgtaccaaataatgattcaaaatacttcggctcgtttgcttgaggtaagaacgagaatatcccgccgccatcattattaacaatcacaatcgttaggttcatcttatattttttcgccataagtaacccgttcatatcatgataaaaggacaaatcaccaatcaataaaaacattggttggaagacaacactagcacctaacgctgaagaaacaactccatcaataccattagccccgcgatttgctagcatttttattttcttatcaatttgtgaaaagtacgtatcgacatcacgaatcggcatactattacctataaagagccctgctttttccggcaacaagcggcgcaattccgcaacaatctttccttcttccaaaatggttgtgttcgccatttcagccaaaacgatttcgcgtgccactttattatacgatgtccatctacttaaccacgctgcatctttcgcatcgtcaggcatattttgttgcatgatatctagtaagaatcgttcatcacagtgaatcatgtccgttaccgctttaatcggatctttccaagcagcacccggatccaccacataaaaacgaatgtctgaaagttgttctaaccagtttttcagtggtttagaaactggcatacttccaaaacgaataactacttctggtgttaatttatccataatctctgcttcttttaagaatgcatcatattggtcaatcactacttcatctagcgccccgtaagaacggagtccagaaagcggatcagctaaaatcggccaacctagttttttcgctaaatcaaccattggctgctccaattctttcttatcaattggtccaacaacaaatacgccttttttaccagtgcattccgtcaccattttttgaatcgagctatcgtctaaaacttcatgtgtataataaatatgtacgtgatgatgttttttcccggtagctgtgaatggtgaaggttctaaaatcggtacaagcggttcgcgtaatgggaaattaaggtgcactgggccacgtggggttttcattgcaatatccaccgcgcgacttccatgccattttgcatagcgaagcatttcttcactgttttcaggaagcgccatatccgtaaaatccttgacatgtgaaccatataaatgtaactgatccatcgcttgcggtgctccaacatttcgaagctcatgcgggcgatcggcagttaaaacaattaatggaatttgtgataaattggcttcagcaactgctgggaaatagttcgccgctgcagttccagaagtacaaagtagaacaactggacgtttcgatgctttcgcaagacctaaagcaaaaaagccagccgagcgttcgtcaacatccacataaatcttcaaaatcggatgctctgccatcatcagtgcaagcggagtggaacgtgaacccgggctaataattgcttctttcacaccggcttgcacaagctcctcaataaatgcagctaaataatctgtcagcacttgttcgtggtttgtcatttctttatgcctcctaatacgcgtaacatcggttggaattttactgccgtttcttgtaattcttcttttggtactgaatcaccaacaatcccgcaaccagcgtagatcaatccttgtgaatcgacaattaagcctgaacgaatggccacagcaaactcaccagaaccttttaaatcaacccagccaatcggtgccccgtaaaaaccacgatccatttcttctttcatccgaataatggctaaccccattttttgaggtaaaccgccgagagctggtgtcgggtgaagagctttcaccatttcaagcatggagacatctggttttttcttcgcagtaatattcatatataaatgttgaatatcacgatttttcagaagtactggttggctagataacgacaatcctgttgtaaatggttttaatgtttcttccatcatttgcactacataagaatgctctcgcaagtttttcgcatcttttaacagcgcatttccaagtgcttcgtccgcttcttcggtagcgccgcgctccgtagaaccagctacacatgacgaatgaatttcatccccattgaccgcaagtaatctttcaggagttgccccgaaaaagacccctgttcccttttcaataaggaagaaataactattttcttgtgttgctagcatattttccaaaataatggcactatctacttggcgctggaaacgcaagcccattcgtctagctagaacaactttttttacgtcttctgaatgattaatcatatcgataatttcactcgcagtttctaggaaatggtctttgccaatctccttaaaatctgtaagtaatgccatttcagcttcattaacctcttgatgaatgattttttgccattgattaaaaacagcttctaatttgctctccgtatcatcggagtagatagacaaattaacagttaaataacttttaccatctttattcgttaacataaataatggtaaataaaacaagccatctttaaaactttgccattctttctctgtatcacgctcaggatcaaaggcaaaaccaccaaagtaaactggtccagttgcatctacggttgcattggttacactagtgcgcagtctcttctcaattttctcttgcagtccaagaaaagcatcttttttcttctccgccaaaaattgtttcgttacaccaaaaccggtcatggtcagtgtcatttctggattttgccagaaaaaacgctcacctttaaaagccgtgccagcttttttaaacaatttgactggagacactaattcatctaactcagttacccagctaaatagagccggttgatcttggcttgcgctacgtttcgcttgattaaataaatcaagaggcaatttagtattcatatgcttatctctccttttacattcacatcttctattataccaaaaatagagctaaactgcttggtttgcgttttttctttcatttcgtcattaattattgacgttcttgcaatatttccctaaaatgaagggtagacatctgaaacatatggaagtgaaaaaggagagaaaaacatggctaatgcctcaaaatctgcacttacaaaacaaactggatttcaaaaatggtggacattacttcgtccccatacacttgtagcctctttcgttccagtatttcttggaacatcggtcgcaatgagctacaccagttttcattttacacgttttatcgttatgctcattgcttgtttctttatacaaacatccgccaatttattcaatgaatattttgattataaaaaagggcaagatgatgagcactcggttggaaatggtggcgccatcgtccgcaatggtatgcgtccaggatttattttattcctagcaattttcttatacatattatcaattctcggtggtgtttatttatccattgaacttaattggtatgtgggattacttggcgcaatttgtatgttggttggtttcctttatacaggtggtccgtatccaattgcttatacgccgtttggtgaaattatggcaggattctttatggggggaattattactttcatttccttctatattcaagcagaatttattagttcgtttatcgtatacgtatcgattccagtgatggtactcgtcggtaacttgctacttgctaatagtattcgtgatttagtacctgataagaaaaatggccgtttaaccttagctatcttgctaggtcgcaaatgggcaaccgttttattcgcagctgcttttctattcagttacgtatttgaaatcgcccttattttcacacaagatgctccgtggtggacgcttctgattttacttagtttgccagaagctattcgcgccgtgcgtcgtttcatcggcaaaacttcgccgattacaatggtcccagccatgaaatccacatctaaagcattaactatctttggtattacattagcccttgcttaccttttaagtctattatccagaaatttattcatgtaaaaaaactggttgtcctcgtgacaaccagttttttatttagacccaatttggacttgctgtttattttgggcatatttcgctaattctatcgataaatcatatcgtaaaaatggcgtaataatataaatcccttggaaatgctcacaaatcgcatccactaattcacgagcaattgccatgccttcttcatttgcatgaccgtgctcttccgcctctctcattcgctcccgtacatcatctgtcaaacgaatcccgggaacctcattatgcagaaattccgcattccgactagacaataatggcataaccccaataaaaagtggcacatcaatatttgctttttgcaaggcttcttttaataagatagctttattcacatcataaattggctgtgtaataatataatcggcaccatattcaacttttcgctcaattaacctaaccgctttctctaagttcagcacgttcggattaaatgccgctccaacatggaatcgtgccttttctttcagtgatttcccagtataagaaatcccatcattgaactttttaattagctgaactaattccacagaccttaaatcaaacaccgaagatgctccagggaaatcacctactttagttggatcacctgtaatcgcaagcacatcatgcagccccaatttatgaaatcccatcacatgcgaatgcatcccaaccaaattatgatcccgcgtcgtcaaatgaatgagtggtttaataccatattcatgcttcaaaatcgaagctagcgccatattactaatccgcggcgtggcaagcgaattatccgaaatcgtaatcgcatcaacgcctgcctcgtcaagtgcctgggctccttcaaaaaatttcgtcgtatcaaaagtccgcggcggatctagttcaaccaaaatcgttaaacgttccttcactttatcaagcaaacgttcaccagaatccacatcctccacttcttctggaacaagttccaaaatcggccgaacttctttttccaaaatgggttttgttgtttcaagaccttttcgcaaagcgcggatatgatctggcgtcgtgccacaacaaccaccaataatccgagcgccttcttgccgaaaaacctccccataatgttcaaaataatccgtatcagactgataaatcacttttccttcttgcatctctggcaaactagcattgggataaactgccaaataagcattatcatacagcggcactgtttcaagagcacgcgccatgtgatacggaccaagacggcaattaataccaactacatccgcccccagcgcaataagctcttccagcgcatccggcaattttttcccgttttgcaaaatacccggttcatgcatagaaacattcgcaactactggtaaatcagtagtctcgcgaagaattttcaacactgtcttaagctcatctaaatcataatatgtttctagcaaaatcgcatccacgccatctaacaaaaaacagtatagctgctccctaaaacttcgcttgatttcttcgagtggagccgccggaagtcttgcatctacagcgccatttattccgccaatcgtcccaaaaatatacgttccagtccctcttgccgcttcctttgccaatcgaatagctgcttgattaatacgcttcacttcatcctctaaaccatatcgcgctaatttaatataatttgcgccatacgtattcgtttggataatatccgccccagcaccaatgtacgctttatgaatcgcaacaatatcttccggatgagacaaatttagctcctcaaacgaacgatccactccataagaataaagcaaagtgcccatcgcaccgtcagcaattaatactttttcgcttaaatcttttcttaaattcacttcgcaacacttcccttcttaatgaatgaaagtgcttgttttaaatctgcaatcaagtcttcagcatcttctagtccagctgaaaaacgtaataatcctggcgtaatcccttgcgccaaacgttcctcttccggaacagccgcatgagacattttagccgggtaagaaagaatactctcgaccgcacctagactcacagagaacactggcaattccaaatgtgtaactagttctcgcaccgcttcctcactgcctaaatcaaacgataaaacagccccgccgcttgtcgcctgttccacttgaatgtcataccccgcatgcgacggtaaccccggataatgcaccgcaaccacatctggctccgcatttaaaaatagcgcaattttctccgccgtttccgtcccagccttcatccgcacagaaagtgtttttagtccgcgcaataacaaccacgaatcctgcactccaagaaccccaccagtcgaattttgcaaaaagtacactgcttcagcaagattaggattatttgtgacaattagccccgccaaaatatcactatgcccaccaagaaatttcgtcgcactatggataactaagtccgcacctaattctaacggtttttgaatcagcggcgttaaaaatgtattatcgacaaatgtatagcaaccattcgctttcgcaagtttagcaactgtgcgaatatccgtcacatgtagcagcggattagaaggagtttccaaataaaccaattttgtatttgcttgaaacgccttagcaacctcgtcaatatttgttgtatcaacaaaagtatgcgtaatcccaaaccgcggcaacacttgttccaccaaacgaaacgtcccgccgtacacatcttttgcaataataaaatgatctccttttgaaagcgtaaaaagtgccgcagaaacagccgccattccactagcaaaggcaaaaccattcgtaccaccttccaattctgcaatcgcctgttccactttttccctggttgggtttccacttcttgcataatcataagcatggtagttatcaaaatcatgttgatggaaagtagaagataaatgaatcggcgtattaagcgcacctgtttctttatcaatcccgaggctcgctttaattacagccgtatcttgcgcgtattctttagccacgagcactcacctcttccaaaaccgcatcgagcgccttagacaagtcagcaatcaaatcctcactcgcttcaatcccaactgagatgcgcaacaatttatctgtcagcccgtaagaattccgcaactccaccggaatatccgcatgtgtttgagtcgttggataagtaatcaaactctccacaccgcctaaactttccgcaaaagtaaacaattctagttctttcaaaagtggcgatacgagcgccgcatctcgaataaagaaactaatcatcccaccacgtcctggatagcgcacttcctccactagcttgtgctcttccaaaaacgccgcgattttttgagcattagcttgatgttgtctcactcgtaaaaccagtgtcttaagcccgcgaatcaataaccaactatcaaatggtgataggaccgtccccgtcgcattcaattgatcaaagaagaattttccgagtttttcctcttttactataaccgcaccagctagcacatcattatgaccaccgagatacttcgtcgcactatgaatcacaatatccgctcccaaagatagcggctgctgtaaaacaggtgtataaaaagtattatccacaatcacaagtaaatcatgcgcatgggcccattttgcgacagtcgcaatatccgtttcctgcatcaatggattcgttggcgtttcaataaaaatcgccttcgtttctggacgaatcaatttttccaaatcagcaatctccgccccgtcccaataagaaaatccaatctgatattgcgcaccaaactgttcaaaatatctaaaagtccccccgtacaaatcctgcgaactaataatatgttcaccagttttaaaaagttggaaaacaagttgaatcgcactcatccctgaactcgttgcaaaagcatgcgtcccattttctagttccgcgagtgcttcctgtaaagcatctcgcgtcggatttccagttctagtataatcataccccgttgatactccaagatcggcatgctggtaagctgtagagaagtagactggcatattgacagcacccgttctttcacattttctatttccaatttgcgctgctatcgtctcttgtttcagctttgccataattacctctcctccattcctttatttctctaatacttgatattccgcacgaacttctttagtcgctttaatcatatcttgtagcgccgcaattgtttcaggctctttccgcgttttcaacccacaatccgggttaatccaaaattgtttcgcatcaattgcccgtaacgcccggcgaatattgtcttgaatttctgtcacagttggaacacgtggactatgaatatcataaactccaaggccaatctccttatcatacgtcacttcttcaaatgtcgaaataatctccccgtgacttcttgacgtttcaatcgaaataacatctgcatctagagcactaatcgtatcaataatatcgtcaaaatccgaataacacatatgcgtatgaatttgcgtatcattttgcaccgaagcagtcgttaatttaaacgaataaaccgcatcatttaaatatttttcccatctagcttgcttcagcggcaaaccttcacgtaaagccggctcatcgacttgaatcactttaataccattacgttctaaggcttctacttctttacgtaacgcgagtccaacttgattcgcaacaacactttcaggcacatcatcacgaacaaaactccagttgatgattgttactggcgcagtgagcatccctttgaccggacgtttcgttaacgactgggcatagacactttctttcaccgtaatttcttctgtaaaagcaacatctccgtagataagcggcggacgaactgctctcgaaccgtatgattgcacccaaccaaatttcgttgcttggaaaccagccaatttctgcccgaaatattctaccatgtctgtccgttcaaattcgccgtggaccaatacatcaatatctaattcctcttgaattttaatccagcgcgccgtttctttttcaataaaagcattatattccgcatccgtaatattaccttttaaccaatcagcccgagtcttccgcacttccggcgattgtgggaaacttccgattgtcgttgttggaaatagcggtaaattcaaccaagcatgctgcaatttaatccgttccgcaaatggcaactctcggtcaacccgaacatttcccaaattcgcaatcgcttcttgtacttctaaattatttcgatgacttgattcattgagcgccgtcactgccgcacgagcatcttccagttcagctgtcacactttccgcaccatccgtcaaagccttcgtcaaaatagcaatctcgtctaatttctgatcagcaaacgataaaccaccgagaatcacttcatccaaatctggttcgctcagtttcgttactggcacatgtagtaaggagttggaaggctgcacaatcaatttcccatccgtcacataatccgcaatctcagtaagtagcgaaagttttgcatccaagtcactccgccaaacattccgaccatcaatcacaccggccgctaaatatttatcttccgggaacccatgagccttcaacgcttcaagcgaatcgccatgatcatgaacaaaatcaattccaatcgccgctactggtaaattaacaacctcttcataataatccaaactttcaaaataagtttgtaattcgattttcaaatttggtactgcggtttgaaacgcctgatacactttttcaaataacttaatttctgatttatcaaagctagttgccagataaggctcatcaatttgcacccacttggcaccagcccgctcaagctctttcagaatttccacatacgccggaataaatttatctaataacgcttcaaaattttccgcatcgttcccttttccaagttttaagtaagtaaccggaccaacaagcactggcttaccttcaataccaagctctttcttcgcttcttcgtaataataaagcgcccgattatccaacactttcggatccgcatccgccagttcaggaacaatatagtgatagttagtattaaaccatttagtcatttcagaggcaaccgcgtcacttttaccacgtgcaatatcaaaatatgtatttagcgaaactttcccaccatcatgctgaaaacgttttggaataattccaaatgtcacactcgtatcaagcacttgatcataaaaactaaaatcaccaaccggaatcaaatcaattcctttttcttgttgttttttcagcgcatgcaatcgcagagccttcgtttcagccaacaattcctcttccgaaatcgcaccattccagaatttttctaacgcacgtttccattcacgtttctccccaagtctcggataccccaagtttgaactaatcgcctttaccatacctatcaccttatcctctcgattttttgccaataaaaaacctccctagagaactagagaggtttggaagtttcgatacacaaatacactgaaactttttaagtctctcttatctctcgaagcatcacacttcgcaggatttagcaccttttcaacgtattgaaaggttgccgggtttcaacgggccagtccctctaccactcattataagagcaatttatttagtttttttaatcacttaaattggattgaaatcatcataccacttgcagctaaaaactgtcaatcattaatttttcattttcttttcaagagcatctttccgtgctccaaatattagcaacaaacagccaagcacaaggattccggctactacaaaataaaatatttgatttccaaaaatcccaatcatcattccagtcgcgctcggcccaataatgcttcccaaactaaaacacataccaaccaaaatattcccagccggaagcaattcaagtggcgtcaaatccgtcatataagataatccaagcgaatatagagacccaagtaaaatccccaacacaaagaagaaaaccacatataaaacaggtatcttaacaaatgcggtcaacacaaaaacaactgcacctgctcccgtcaatagaggtaatacttttcctcgtccaaacttatcactaacaatcccaataggcacctgaaaaataatcgtccccaccgaaaaagaagaaataaccatcgcaatcatcatcgtgtcgagtccatcacgcaacccaacaactggaaatgtcgcattaagtccagtctccaaaatcccatataaaaacggcggaatcatcgctacccaagccaatttaaatacatccgaaaaacgtttcaaactaccccaaaaagaaattttccgaatcacagccttttcaccaacaaagtcattacgaacaaaccaaacgagtccccaagctatcaaaactaaaattccagataaaaagaaaggcaagttcgcattaatttctgctaaattaaccaattgcggcccaatcgcaaatcctaatgagaaaaacaaaccataaatagccatattccgaccacgtttactcggatcactcattgccccaatccaagtctgcgaagaaaaatgtaacatatgatcccccacaccaataagcaaccttaatataaaccaaaaatataaattaaaccaaattggaaaagccaaaatcgaaaccgcaactagtcctcccccaactaaaataatcggcttatagccatatttatgaagtggcgcctcaataaatggagaaataagcaaaactcctaagtagattcccgtagcatgaaacccattaattcctgcacttatacctctctcctctaatattatcgcaataagaggtaacaaaaccccttgtgacaatccagaaatggcaacaaccatcgtcaaaatccaaaacttacctttagcccccattagatacctccaacaaaattttactaaataaaaaaacaatgtcacaaactgacattgtttttaggatgacccgtacgggattcgaacccgtgttaccgccgtgaaagggcggtgtcttaaccgcttgaccaacgggccatatctggcggagaaggagggatttgaaccctcgcgccgcgcgagcgacctacacccttagcaggggcgcctcttcagccacttgagtacttccccagatataaaaagcttattctcttttaaagaataactccacaggcaggactcgaacctgcgaccgatcggttaacagccgattgctctaccaactgagctactgtggaataaaatgggcctaaatggactcgaaccatcgacctcacgcttatcaggcgtgcgctctaaccagctgagctataggccccagtaaaactatattcatggtaaaaagcgggtgatgggaatcgaacccacgacaacagcttggaaggctgtagttttaccactaaactacacccgcataatataattttaaaaacaaagggcggataatgggaatcgaacccacgaatgcctgaaccacaatcaggtgcgttaaccacttcgccatatccgccataaggcaaaaatgtttaaaaaaagaatggcttgggacagaatcgaactgccgacaccttgagcttcaatcaagtgctctaccaactgagctaccaagccataatggcggtcccgacgggatttgaacccgcgatctcctgcgtgacaggcaggcatgttaacccctacaccacggaaccactattgcgggggcaggatttgaacctacgaccttcgggttatgagcccgacgagctaccagactgctccaccccgcgacaataatattaaattttagtccacatatcacaagtgaaaaacggaggaagagggattcgaacccccgcgcggtattacccgcctgtcggttttcaagaccgatcccttcagccagacttgggtattcctccatgataataataaagtgacaagtggaccttgcaggactcgaacctgcgaccggacggttatgagccgtctgctctaaccaactgagctaaaggtccaagattgaaaatagcggcggagggagtcgaacccacgacctttcgggtatgaaccgaatgctctagccagctgagctacaccgccataataataaggcaactattttctacttaaatgtgaaacaagtggagcctagcgggatcgaaccgctgacctcctgcgtgcaaagcaggcgctctcccagctgagctaaggccccttaataataagggattaaactatcgggaagacaggattcgaacctgcgaccccttggtcccaaaccaagtgctctaccaagctgagctacttcccgtttaataaagtgcgcccaagaggagtcgaacctctaaccgcttgattcgtagtcaagtactctatccagttgagctatgggcgcaaatataagtgccgaggaccggaatcgaaccggtacggatatcactatccgcaggattttaagtcctgtgcgtctgccagttccgccaccccggcgttgctataaaatatggagcggaagacggggttcgaacccgcgacccccaccttggcaaggtgatgttctaccactgaactacttccgcatattccataataagtgcgggtgaagggacttgaacccccacgcctcgcggcgccagatcctaaatctggtgcgtctgccaattccgccacacccgcaaaagtgagccgtgctgggttcgaaccagcgaccctctgattaaaagtcagatgctctaccaactgagctaacggctctctacaataaaaaatatgtattattataaagttaatattaatggtgccggctgcaagagtcgaactcgcgacctactgattacaaatcagttgctctaccaactgagctaagccggcataaaaaatggaggttaacgggatcgaaccgctgaccctctgcttgtaaggcagatgctctcccagctgagctaaacctccagaaatactgcccggcagcgacctactctcgcagggggaagcccccaactaccattggcgcagagaagcttaactaccgtgttcgggatgggaacgggtgtgaccttctcgccataactaccagacaatattgaagttgttgaaagattgctctctcaaaactagagaagaaagtgttcagttaggtaacttcgtttcattttttggttaagtcctcgatcgattagtatttgtccgctccatgtatcgctacacttccactccaaacctatctacctgatcatctttcagggatcttactttccgaagaaatgggaaatctcatcttgaggggggcttcacgcttagatgctttcagcgtttatccctgccacacatagctacccagcgatgctcctggcggaacaactggtacaccagcggtgtgtccatcccggtcctctcgtactaaggacagctcctctcaaatttcctgcgcccgcgacggatagggaccgaactgtctcacgacgttctgaacccagctcgcgtgccgctttaatgggcgaacagcccaacccttgggaccgactacagccccaggatgcgacgagccgacatcgaggtgccaaacctccccgtcgatgtggactcttgggggagataagcctgttatccccggggtagcttttatccgttgagcgatggcccttccatgcggaaccaccggatcactaagcccgactttcgtccctgctcgacttgtcagtctcgcagtcaagctcccttgtgcctttacactctgcgaatgatttccatccattctgagggaacctttgggcgcctccgttactctttaggaggcgaccgccccagtcaaactgcccacctgacactgtctccccacgcgctaagcgtggcgggttagaatggtcatacagccagggtagtatcccaccattgcctcctcgtatgctagcgcacacgtctcttcggctcctacctatcctgtacaagcggtacaaacattccatatcaggttgcagtaaagctccacggggtctttccgtcctgtcgcgggtaacctgcatcttcacaggtactataatttcaccgagtctctcgttgagacagtgcccagatcgttgcgcctttcgtgcgggtcggaacttacccgacaaggaatttcgctaccttaggaccgttatagttacggccgccgtttactggggcttcaattcgtaccttcgccgaagctaagcactcctcttaaccttccagcaccgggcaggcgtcagcccctatacgtcaccttacggttttgcagagacctgtgtttttgctaaacagtcgcctgggcctattcactgcggctctctcgggcttgcaccctaatagagcaccccttctcccgaagttacggggtcattttgccgagttccttaacgagagttctctcgctcaccttaggattctctcctcatctacctgtgtcggtttgcggtacgggcagtactactcttcctagaggcttttcttgacagcgtgaaatcaggaacttccgtacttaatttccttccccatcacagctcatgcttcgcgagaagcggatttgcctacttctcacactcactgcttggacgcacatttccattcgtgcgattccctatccttctgtgtcaccccatcggttaaacaattagcactggtacaggaatctctacctgttgtccatcgcctacgcctatcggcctcggcttaggtcccgactaaccctgagcggacgagccttcctcaggaaaccttagatattcggtggaagggattctcacccttctttcgctactcataccggcattctcacttctaagcgctccaccagtccttccggtctgacttcaccgcccttagaacgctctcctaccacgaacctctaaagaggttcatccacagtttcggtaatatgtttagccccggtacattttcggcgcggggtcactcgaccagtgagctattacgcactctttcaatggtggctgcttctaagccaacatcctggttgtctaagcaaccccacatccttttccacttaacatatatttggggaccttaactggtggtctgggctgtttccctttcgactacggatcttatcactcgcagtctgactcccgagtataagtacatggcattcggagtttatctgaattcggtaacccgagaagggcccctagtccaaacagtgctctacctccatgactctttacctcgaggctagccctaaagctatttcggagagaaccagctatctccaagttcgattggaatttctccgctacccacacctcatccccgcacttttcaacgtgcgtgggttcggacctccagtaagtattaccttaccttcatcctggacatgggtagatcacctggtttcgggtctacgacctgttacttatgcgccctattcagactcgctttcgctacggctccgctttttccgcttaaccttgcaacaaatcgtaactcgccggttcattctacaaaaggcacgctatcacccattaacgggctctaactacttgtaggcacacggtttcaggaactgtttcactccccttccggggtgcttttcacctttccctcacggtactggttcactatcggtcactagggagtatttagccttgggagatggtcctcccggattccgacggaatttcacgtgttccgccgtactcaggatccactctggagggaaagccatttcaactaccgggctgttaccgtctttggcgggcctttccagaccgcttcatttataactttcttttgtaactccgtatagagtgtcctacaaccccaagaagcaagcttcttggtttgggctctttccgtttcgctcgccgctactcaggaaatcgatttttctttctcttcctccaggtacttagatgtttcagttccctgggtctgccttcctcacgctatgtattcacgtaaggatactatccgactaaagatagtgggttcccccattcggaaatctctggatcaacgcttacgtacagctccccaaagcatatcggtgttagtcccgtccttcttcggctcctagtgccaaggcatccaccgtgcgccctttctaacttaaccaatttacttctacgaagtaaaggttgtttttctgattttccgtatcagcgatgatacatccaatcagatgaaagattcactttcagatgattctcggttacttgtgtcataaataataaattatctatgctaactttactaactttcttatctagttttcaaagaacaaacatactgagaagtactaacctctcaaaactgaacaaatagagaagaacgaaaactcacaggtttccttttccttagaaaggaggtgatccagccgcaccttccgatacggctaccttgttacgacttcaccccaattatctgtcccaccttcggcggctggctccataaaggttaccctaccgacttcgggtgttacaaactctcgtggtgtgacgggcggtgtgtacaaggcccgggaacgtattcaccgtggcatgctgatccacgattactagcgattccggcttcatgtaggcgagttgcagcctacaatccgaactgagaatagttttatgggattagctccacctcgcggcttcgcgaccctttgtactatccattgtagcacgtgtgtagcccaggtcataaggggcatgatgatttgacgtcatccccaccttcctccggcttgcaccggcagtcactttagagtgcccaactaaatgctggcaactaaaatcaagggttgcgctcgttgcgggacttaacccaacatctcacgacacgagctgacgacaaccatgcaccacctgtcactttgtccccgaagggaaagctctgtctccagagtggtcaaaggatgtcaagacctggtaaggttcttcgcgttgcttcgaattaaaccacatgctccaccgcttgtgcgggcccccgtcaattcctttgagtttcaaccttgcggtcgtactccccaggcggagtgcttaatgcgttagctgcagcactaaggggcggaaaccccctaacacttagcactcatcgtttacggcgtggactaccagggtatctaatcctgtttgctccccacgctttcgcgcctcagcgtcagttacagaccagagagtcgccttcgccactggtgttcctccacatatctacgcatttcaccgctacacgtggaattccactctcctcttctgcactccagtcttccagtttccaatgaccctccccggttaagccgggggctttcacatcagacttaaaagaccgcctgcgcgcgctttacgcccaataaatccggacaacgcttgccacctacgtattaccgcggctgctggcacgtagttagccgtggctttctggttagataccgtcaagggacaagcagttactcttatccttgttcttctctaacaacagtactttacgatccgaaaaccttcttcatacacgcggcgttgctccgtcagactttcgtccattgcggaagattccctactgctgcctcccgtaggagtctgggccgtgtctcagtcccagtgtggccgatcaccctctcaggtcggctatgcatcgttgccttggtaggccattaccctaccaactagctaatgcaccgcgggcccatctgtaagcgatagccgaaaccatctttcaaaagcgtggcatgcgccacattctatcattcggtattagccccggtttcccggagttatccccaacttacaggcaggttgcccacgtgttactcacccgtccgccactaactttggaagagcaagctcttcctccgttcgttcgacttgcatgtattaggcacgccgccagcgttcgtcctgagccaggatcaaactctctttaaaatataaattgaatttgaatacttattcaacaccgtgaataagattccttgcgtcaaattgacttcgctagcaattaaattactagtttgttttgttgaaaacagctttctgttttctgccctgcgattaccagtgagactttacgtctcattgcttttcgtcttcttctttgttcagttttcaaaggtcagttagtcgctttcatgcttgatatgcgaatgttttcgtttgttttttgcgacttttaaatcatatcatttcagcaactatctgtcaacaactttttgaatttattttatgaataaaattcatttaaatcgctgctatcgtagcgccgaaaactaatatatcaagttttgagatatatgtcaaccgaattatgcataaaattaaataaaaatgaaaaaaattgcaaaaaaacacctagctaggctaagtgttttgattaattatttgattgtttttctttacacgctggacatataccatatacttccagtctgtgattatctatttcatatccggtcatatgtgctgcgaaatgttctacttcatctaaacctggataatgaaaatcaactattttcccacacacattacaaattgcgtggtaatgattagatgtagaaaaatcaaatcgactagatgcatcaccataggataattccttaattagaccagcatcacggaaaacgcgtaaattattatatacagttgctacactcatgttagggaagtttccttctaaagctcgataaatatcgtccgcggttgggtgtgtatgtgagttaattaagaattctagtatagcatgacgctgaggagtgattcttactcctgttttcttcaagacatctactgcctcttttagagttgcattagacaccgccatgcactcccttccaaaaataattattatattcataataccggaaataacgtttaactgtcaatagaatggcagaatttatagcttaatatcctttatttaaatcaatttcgttccttaattttgtattttctttcaagtgattgatattttcaaaccaaatttcaaagctgcgctctaaatatttatccgaatgtccagatacatgtggtgtaatagttacattatttgcttgccataaggaattgtcttcggaaagcggctcttcagataaaacatctaaataaaaatgagctattaattggtcttttgatgctttctctaagacatttaactctacagcacttcctcgccctatattgataaaaactgcattatttttcattttctcaaaaaatgataaagaataaatacccattgtttcatctgtatgaggtaaaacactaacaaaaaaatctgctaatggagcaactttttcgatattcgtcattgcatatgtttcactaaatggtttcgcggggtggcccgttgtatttacccctatgatttccatatcaaatgcttgagcgaactcggccacttttgctccaatggctcccgttccagctactaccaaagtttttccagctaattctgttattggttcttcacttgcccaatttttttctttttgcatttgataaaagaaagcagctttttttacgtgtgctaacataaaagatagcgcgaattcacccattggtatcgcatggattcctcgtacattagcaactttaatttttctttcttgaattatttctcttggtaaactatctactcccgcggaaaaaaccatgattaattttaagttgcttgcttgtttgattttggctttggtaatgttagatccgtatgtgacgatgatatctatctccgctaaattggcaaaatgatcattgctctcataataaaaagtatcctctggaaatttctctgcttgcaaagtctgtaaatattctggaacttccaatgtaaataaaatgttcattttgcgccacacttcctttctttagctatatattaattttatgctttttttcatttaacagcaattaaattgttttttcaattgcggcatcttattttttcgcatagaatataagaggtattaaaattttgaggagatgacgaaatggatcattcaatgtcaaaaaaattgcatgatgaagcacttttacatatagttggcggggttaatagcccatctaggtcaaataaaggagttggcggcggaattcctgtaacgatggaacgggctagtggcgcttatttttatgatgtggatggcaataaatatattgactatttagctgcatttggaccaatcattacgggacatgcacatcctcatattacagaagcaattacaaaagctgcgcaaaatggtgttttgtacggaacacctactaaacacgaaatcacttttgcgaaaatgttaaaagaagccattccttcacttgagaaagttcgttttacaaattctgggacggaagctgtcatgacaactattcgtgtcgctcgtgcttatacaggcagagataaaatcattaaattcgctgggtgttatcacggccactttgatttagtgctcgtggaagccggttctggcccttctacgcttggcattccagactccgctggggtaacaaaatcaaccgcagaagaagttatcactgtcccctttaatgatcttgattcttttaaagaagcattagctatttggggcgatcaagttgctgctgttttagtagagccaattgttgggaattttggaatggttgcaccagaagatggatttttagaagcagttaatgaactcgcacatgtcaatggttctttagtgatttatgatgaagtcattacggctttccgttttatgtacggcggcgcgcagaactatttaggtgttattcccgatttgactgccatgggtaaaattattggtggtgggcttccgattggtgcttacggaggtcgaattgatattatggaaaaagtagcaccacttggaccggcttatcaagctgggacgcatgcggggaatccagcatctattctttcaggaatcgcgtgtctcgaagttttacaagaagaagggctttatgagcgctttgaaaaatatggttccatgttgaaagatggcattgagaaagccgctgctaaacataatattgcggttactgttaaccaaatcgtcggtgctcttactgtttactttacggaagatcctgtaactaactatgctgaggcaggtgcaacaaatggtgagttattcggacgattctttaaaggaatgctagaagaaggtattaacttggcgccttctaaatatgaagcatggttcatcacttccgcacactcggaagctgatattttagaaacaatccaagcagttgatactgtttttggaaaaatggttcaagataactaggtaatattactttataaacttgagagaaacgttataatagaagaagaatgagcgggaaaacgagaaaattcccgctcaaatagtctatagaaaggaataaccttccatgaaattcggagctagaattttgaaaactggtattgcaatcacattggcgctttttatcgctcaactttgcaattcaccttctccatctctggcaggcatttccgccgtttttgctatccaaccttctatttataggtcatatcgaactattttagaacgggcacaagggaacgtaattggagccatcattgcaattatttttggactttatattggtaatgattttattttaattggtgttgcttcgataatctgtgttgctttattaatgcaattccgcttggagaatacgattggccttgcagtcgtgacgctcattattgtaatggattctcctggtaatgactttttagaaatcgcgcttattcgttttgggacaattatgttaggtttacttgcggcatttattgtcaatctattctttttaccaccgaaatatgaagtttcattgtttcagttaatttataatacgaatagtgaaattgttcgttggataaaattaaacttgcgtcatgctgcggactttcctcttctaaaaaaagatatggaatggatgcaaaaacagttaaatcaaacgcgtaacttatatggtttatacagagaagagcgtacttttttaaagaaaaatgccatttcaaaagggcggaaaattgctgtatataggcagatgttgctttgttctcaaaaaggttttgagcttttaaaaatccaacatcgctatgaaaatgattatttgcaactgcctccagataagcaagaattaatcagacagcatatcgattacttaacggataaacatgaacaacttttactgacatatatcgataaagtttcgattgatcttgaatatgtagagtcacatttagcgcaggatccccaagatttgatgcaacttttcttacgtgagatgagagaaacggaaaaagatgagtatgaggatatgatggataaataccatttaatgcgtattatcgcttctgtttttgcttaccaagagacaatcgactatttagaaaaattaattcatagttttaaactcagacacacgaaagaaaaccaaattgatattaatgttaatgaagaataaacaaaaaacgagcttggagatagactccaaagctcgtttttttaacggtattctttgtacttttcataccaaatgtcaatgtagtcaggggaaaacggaccttttttgtccaaaatccagtggcttaacacatccacattatgtcgaagtatccggtcaattgagtctgggtacttcatttggcgacggtgttgttcgtattcgccctcatcgagcaaatgaaaccttccatctgggaaaaccttaatatcgaggtcatagtcaatgtacttaagcgcttgttcatctactgcaaatggtgtccctagattgcagtaatgataaatgccgtcttctctaatcatggaaattacattaaaccagtaatcactatgaaaataacagatagatggttcgcgcgttacccatttacgtccgtctgcttccacaactaatgtgtggtcgtttccgccgataataatattctccgtagatttaagcaccactgtctttttccaagtacgatgaagttttccgttatgtttgtagctcttgatctgtattatttctttctctttgggtaagtacatcctttatcctactttcctcatgtactatcaaaatcattattattataacataaggctagactgcaaaaaaacaatatcgtgctgaaacggaagattttcctcaaaaaagaacattttttaaataaaatagctaattttcacctattttgctttactatactaaaagtgttctgccaccatctactaaaatagtttgtccccgaatcatatctgctttttcgctcgcaaggaataatacggcatttactaagtcgttgggctcaatcattcgacccgctggtgttttacttacagcatcttttaacaattcttcacgatttggaaagtgatttagtgcatccgtttcaattaagccgccagaaacagcattaaccgcaataccaaatggtgcaagttcgactgctaaataacgagtaagtgattctaccgctgctttcgaaacaccaactgttgtgtaattctctaaataacgaatcgagccaatcgagcttaagctgatgattttcccgctttgatggcgttgcattaatttagccgcctcttgtccagcaaataataacgccttcgcattaatattcattgtccaatcccagtgtgattcttctagttccatcaatggtcgaagtaccccactcgctgcattgttaataaaaatatctaaccgaccaaattcttcatctactgctttaaataattctctaactttttccacgtcaccaacattggctttaaaaataacgcattttctgccaagttgttcaatttcttgttgtacttcttctgcttttttgcgatttctggaaaaattaacagcgatatcatagccttctttcgcaagtgcgatggcgatttctctcccaagtcctctactacttcctgttactaatgctactttgttcatttattattcccccttaaaatctttccacgcttgccacattttttgatatggtactggaaaagcaagtcgtttcatttcttcttctgtcgcaaaataccaattttcatttggaattgctgactgaagttttgccacacgaatgtccattttccagactaaatgagaaaaaacgtgtttgatatgcgcaattggctcgtcttctagtaaaacttctaagccataattatgcaaaaattgtagtttggctacttcatcattttcttttttagaaatttcaatagtaggaaattgccacatattcgcaagcagaccattttctggtcgtttctctatggcaatttttccgtcttctgaaataacaatgatgcttaatagttctttggttttcattttcactttttttatttttactggataattcgtttcaacgccatttttatgcgcttcgcaaaacggttggagcggacaaagcatacacattggttttgttggtgtacaaacaagcgcaccaatttccattaaaccttggttaaaagcggccggattttttttgtcaattagttgatataatacctcttcaaaaattttccgggtggatgctttcatgatgtcctcgccaatttctaaaacgcgcgcgataacacgcatgacattcccatccactgctggttctgcttggttgtaagcaatacttaagatggctccagctgtatatggtcccacacctttaagcgataaaatagtggttaagtcggtaggaacttcaccagaaaaatctgccatcacttgtttcatggctgtttggagatttctgacacgagagtaataacctagaccttcccaagcttttaaaatgtccgcttcatctgcatttacaaaactttccattgttggaaattgagtcataaagcgattaaaataaggaatcactgtgtcgacttttgtttgttgaagcatgatttctgagacccaaattctgtaaggctcggtattttcgcgccacggtaagacgcgcttattcgcttcataccaggaaacgagtgcttcttgaaaagcagttatctttgtttcatcccaagttagtctcttcatttttctcattttcccctcgtaattctaatagatttctaatgtgtgttgctccggatgtgtagtataatgtagacagggaataaaatagtatacccattcttaagccgatttctattataccgaatgctggcttaattgaatagtgttgtgctcttataggcagcactcacttgtattttttaagaccgattttagaggaggcaaagtcattggatactggcacacatgtagtaatgggaattgcactcggagcgttagcaaccgtagacccggtagttgccggaagttctcaagctgccattggtattatgacagcaacaattattggttcacaaattccagacattgacactgtattaaaactaaaaaacaacgctgattatattagaaatcaccgaggaataacgcattccttgccgatgcttgccatttggccattacttatttcatctattttgtatttacttttcccagcagccacatttattcatttactgttatggacgtttatcgcggtgggattacacatttttgtagatatttttaatgcttacgggacacaagcagtcagaccgtttaaagaaacatgggtcgcatttggatttatcaacacatttgattggttcatttttggttctcatgttgtggctattgcggcttggttattaggttctccagtattacctacatttgtaacactctacgtcattttggcactttattatgtggcaagatttgttacacagcgaatgattaaacacgcagttcaaaacttaattccagattcagaagaaatcattatagcttccaccatccacttcttccagtggcgtgtggcagtaacaacgaaggatcattactatgtaggtcgagctttcaaacgcaatatttccatctatgaaaaatttgaccgcttacctgttcctgataatgaaatcattcgttctgcgaaaaaagataaaaatcttgctgcatttatctcattctccaaagtttacaactggcgcattgaggaaaaactagacgggacttatgtaacattcaccgatttacgttatcgtagtaatgggcactatccatttgtagcagtagtaaaattagatgatgacttaaaaattgtttcatcttacactggctggattttctccacagaaaaattatacaaaaaactagcacctgttagtatttaaaaaaaagacccgggattccgggtcttttttatttatctacctgtgctccctaccccgccaacacgggattcgtttgcgacgatatctgtatctgcaactaagtatttttggaatacgccttgagcgacgcgttcccccgcttcaatagatactggttcattggagaagtttttgatggcaatgccgatattgccgtcattacctggattactataataagaggaatcaataattcctgtaccgttacatagtagtaaacccttttttataccaatggaagaacggacatagatattcaaaacctcatcttcctgcatataacttttaatatctgtccaaaaaatatgtttttctcctggcacgatggttactgtttcattggagaagaaatcatagccagccgaacctttgtctccgcgtattggtagagatatggtttgttctggaaattttctgcttgcttcatttactacttcaaatcctcttactttcaatttgttcactcctatttgtttgggtcttttcgttctacttggtgtaaaaagctgccgtggcgctcgatttgctgacggacataatctgccgcgtactcaggcccacgatacggataacccgctttggcataagaactttcaaaatctgaccaaagcatttcaatccaccacaaggcttgctctttatctaaatgcggatttttaaccattaattccgctgttagttcatctaaatacgtatacaattcactcttcctcctcgaaactgatttcattctcagttaggtatgattgaattgtatcataagaaaaacctttctgcattagcgatgtgattgttttttgtttagcaatactaggtttgtagcgtttatttttacgcattgttttttcgatttgcttttgtaaaatttctgcttcatccgccacatccaattcactcgttgcttcagtagcggctgctttggctagttcactagtaaagcctttttggattaaatcggtgatgattttttgttgaagcatttttttggcacttttgttatttcgtttcataattttcattgcttgtttagtcgcattttctagctgggcttcgtctgaatattcttcgataacccggctaatgatttctctcgttagccctttttcgactaattcgcgttcgatagttcgtgggccttttaatgtcgtcttgatttgcgttttagtatatagttccgcaaattcgaaatcattgatgtagtccatgttagctaatttttttaaaatttcatcaatcgcaaaaggttccatttcttgttttcttaaataatcgcgaatttctttttccgaccggacccggtgggataagaagttgatggctttatttagcccttttcgaaccatatcagcttgcttgatttcttctatatcagcctcggtaaggactttacctttcatcagctgatagcgagctaaaacctcttcgtctacactaaagttgtatttttcatcgataaaaatgttatagcgttctttgtttttctgctggacacttatggacgtgattttcataatccgcctccttctcccttctatcatacagcaaaaaatggttttaatactactaaaaagggaataaactagttaggacaatgaagaggtgataaaattgcatatcttacttacaggcgcaacaggttttattggtgatcatttagtacatgaattagaaaaatctgatcacgagctttatattttaacaagacaaaagctaaaaaaccgcgcgaatgtacactatattgaatggttgaatgaagataaattgccgaatttagaagatttaccagtggatgtttgtattaatttggcaggtgctggtttgatggatgaaaaatggacttatgatagaaagaaagtgattgtaaatagccgcatcgaagctacttcagcgcttctatcaattgtgaaaaaaatgaaatcaaaaccaaaattgtggattaatgcgagtgcaattggggcttatacttcttctaagtcaacgatttatctagatacagaagaaaatacttatgcagataacttcttaggaaaaacagtttatgaatgggaaaaaacagctagtgcagcaagtgatttgggtattcgtgtcgtgtatgctcgctttggtcttgtactcgggactaacgggggctcgttccctgtttttgaaaaattattccaaacctatacagggggtcgctttggtaatggcagacaatggtattcttggattcatgtggatgatgttgtagcggcaatcttatttatttttgaccacgaacaaataaacggtgtcgttaattttacagcccctcaccctgttcaagaaaagaaatttgctgaacgccttggaaaaaaaatgcataaaccgtataaaacacctgtacctaaaaaaataattaaattcattctcggtgaacgtgcaatgactattttggacagtcaacgtgcttatccggaaaagctgatgagtaaccattttgagtttcgctttgaaactttgcaagaagctttagatgacttgttagattgataaaaaaccagattctgattttactcagaatctggtttttttgtttcttcttcgagtgggaaatcaaggactacttggctatttgcaagtggtcgttttttaccaacaagaatcattaattgtaacatggtgaaagcaatggaacttctttttctaaaggcaacaaatttttgttcccattctgtaacatatttggatttaaaattacgtaatcctttgaaaccgtaaaaaccttgactataacggtatacaagtccggctaatcgttcacctaggaaagcatatttactttccccaacattggcaagtggtgccataccggcattaaatgtttggaagccatcttctttggctttttcgaataggttaatgaaaaggaaatccataatacctgatggcgcttctttggagtaacgcattaaatcaatcgaagtcatttcgtctgtatatgacggcatcatcgaagcaaatccaacgatagtaccttctccgtttttagcgatagcaatcggagcttgttcgagataatacgtatcgaagaatcctaatgagaaacctttttcttccctaccatctagccactcatcagaaactgctcgtaaagttgtccaagtgtcgtgattgaatggtggttctattatttcaaaagtataaccttctcgttctaatttattcatgagagctcgctcaccttttttctttttaccactcattgtaaagttttggacgtcgacaaaaccttcctcgccaagcttgataaagtcaaatccgtgatcatgtaaatatggaatcatcgtgccccggacttcatagaaaacaggtcgatagccaaatctatcagcgttcatcattacctcttcaatcgctgcttccattttgtccatgttcccagttggttcgcccatgatgaccattttgtccgcaatgattcggtaagagaaaagtacttccccctctgctgcccaaaatagcagtttatcacgtaagaacatcgtatgactgacttcatttccgccccatttcgctaaatgttcgcgtactttgactgcttcaaatggagagccaagtttttcttttgttgtggataaataaatgtaaataatgactaaactaacaacggcgataaatacgccaacgaagccgactaaccataaatgctctgaggcaatgcgtaaatagtcagggatttctttggagtgtttgatatttggtgagttgtaaataccgataacaatgtaacctgccagacatacgatgaaaataatgctatcaataattactttactccaagtataaaccagtttttctcggtaaaattcgtttcgagctaagaataaacataacagcacaattcctaaaaagattgcctgcttcatcgaaaatacgcgagcaagtgtgttgaaaatcgcgcaacctagaacaattactgtaataatatacgctttctttgttttacattcaatccctctcgcaagccccagtagtaaaaagccaaatgcaacaatggtaatttgggaagtgaataagaaattaaacggcataattttgtataagaatggcacatggtaaatagcgtttggtacggcggaagacaaaattaacaataacccagagccgtaaacaaaaataactaagaagcgatgggccactttttgtaagaataataacggtaatccttctaaaaagtcatttacttttttaccagctttttggacgaagaaaagtagtcccactacaaaaggaataatatagtagaaaattcggtaaaatagcatccaagcgagcgctaattcttgagaaacacctaattggctaagtccaagaatcatcacgacgtcaaatgtccctactccaccaggtaccatcgaagcaatcccaattaccgaagcaataacaaataacgggaacactttgaaaatatcgactggttctcccatcaatgtaccgataatcgcgaaacatccaaaagcgaagccccactccaaaagagaagcgataattaacgttaattctcttttgataggtaaatcaacaaagagtgacttacttttccatttcgtaatagtaaataaaatcgggaagtaaagaccacccgcaagaagccatggccagtaattaacaaaatgatctgcaaatcctggaatgagtaaagtggctaatgatactaaacagtaaatcgataaaccagatactaaaaataaagcaatcttagaaatagctagtaaaatttccttatgagatgcatttttcccataaaaacttgctcttaaactggcacctaatacgccaccaaaaccgccaatattagtaaaggtattcgtaatccaaccagaggcaatcacatgacttggcgaaaactttccaggtaacaacttaacgatgacataatcatacaaaagcattggagtgacagcaattaagcccacgataaacataataaatatttgttccgggctttgagaagttaaattttcttttagcgacggatagtcaatccccgtcgcaatattaataatttcaaaaataacaaaagccatcacaaaagtaataaaaacgatttttacgacggtactatttttttgaaaccaggcataggcttgcattaatttttctttcataacagagtctccttaacgatttccattcatcttcttttattgattcgttttctaacagatggtaaagcataagctagtagaatgcctattaatccacttaacgtatttaaaatgatgtcatctatatctgtagaacgttttggtggtagcgatatactttcaaatcctgtaatcatcgttgtttgcgcaaattgaagcagttcgatgccgcaagatgttaagaatatgactaataatgtttttcccgcagtgcttgttattttaaagtaaagcatgaaaaaagacagtggacataacaataaaacattcccgaaaatttgaataatagtaggcatcgttggtaatgtttgttgaaatgtattttctatagttgtaaaaggtattaggttaatcatttctttttgaatatggaaattcccagtataagtactgtttacgaaatccccaacagctatgtaggcaacaaggtgtaacaaaataattatatatagaataaaaacgcaaaaccatataaagtctatccaattctttagtctcgccatgttagttagtattagggttgctaaaaaaagtaaacaactatttgcaatggtattaattaaatctgcgttattcccaaattgtagtgcaagcgaaatcccatacaggagatataacgctggcaataacaacacaaaaaaacggcatttttggacctgcattctcgtattccaacgccttccgtttcaaaatcagctttcagactctctgaataagctcctagtaacagtttagcagatataaaaatgaaaagaaagcttgtttgtgcttacatttttgcaagcttctgtaaggctttcgggttcttattttctttttgactaaaaaagtgctacaatttcttaatgatattcgtggaggagactaggatgaaagaattattagggttattaaaagaaggtaacaaatcagccttaacagctgctcttgtgaacaccgttgtttctattatcaaaggtgttacttatttttttacaggaaatattgctatgtttgcggaaacattacatagtcttggagatgcagcaaatcaattttttgttttcatcggctctgctttaagtaaaaaacggccgacaaaacgctttccacatggttttgggcgaatggttaacttagtgctacttggtgccgtcattgttgttgggataatggcttttgaaacgattcgtgaaggtttcgcgcatattatccatccaacaagctccactggctttcttattaatcttacagtacttttactttgtaccttgctggagttttctgttttggtaaaagcgatgcatgagattgcgcacgatgttggtttagaatcaaaaggacttcggttatttaaagacagtatcttaaatctaggtaaagcaaaagctgcaaccaagctcgtatttttggaggattccgttgcaactggtggtggacttcttgcgatgatagcggttattatttctcactttacccctttccatcaagcagaaggtattgcatccatgttaattggtgtgatgatgtttatcgtagttggtaaagtctttttggacaatgcggctggagttattggcgaatcagatcaaagcatgcatttaactgtcggtcagctagtaatgagtgatcctgatgttcgagatattcaagttctaaccgttcttaaagaaggcgatgttttccatgttgatgttgaagtggaattagatcccatgctcacccttgctgaggtcgatgatataaaagaccgtttggaagaaagtatcggaaaattacgcggtgttgctgatgtacttatttcatttgatgaagatgatgccatccgtaactgggaatatggggacggacgttaaaaatagaaaaagccaagtgcgcggactgcgacacttggcttttttagtctcccggattaataatagcaagtacttgatggtcttcccatgttccattaatgcgaacattttgtactgcgagcccttctaaatggaagcccgcttttaaaaggacttgtttagaacgttcatttttcggcatcacacctgcttcgatacgatgaagtccgagtatatcaaaaccaaaatctactattaactgcactgcctcggttgcataaccatttccattatgtttcttatccagaaaataaccaataaacgcagattgtaaagattcacgtaaaatactaaataaattaatcgtaccaataagttcatccgtatcattgaggaaaatcccgtaatagtactccacatcactcgcagcaaaatcttccaaacgtgaaataagcgattgctgttcttctatcgtataaaaacgatcatcccgctccatagaataaccttcaaaaaaagctttattcgctaaatgaaaagctagtttttgattggcatctattatttgaaaaggtcttaagtaaatccgttcccccgtaatccgcatccttatccctcccgcatttttctaaattataagattgttctgatgtgattgcaagtatcactgctaagcttaatttttctatatacccattttattaaaaaataaactttccattacgaatataagtgtgttattatgttgatgttggttatttttatattatttttctaaaaaatggaggtttttttaatgaatgttaatgcggaaacagaagacgcaactctccttctcgatggtttacttcaaaacgtggcaataattcgttttgatactaataaaaaagtaacttatgctaatgcgctttttgccgaggcaatgggatactcagaagaagaaatgttgaaattatcccacccggacttatgctttcctgattttgtccaaagtgcgagctataaagcaatgtggactaatttgcttgctgggcaaaaatttcaaaacaaaattgaacgaaaaaatgcacgcggtgaacgtgtttggtttgaagcaacatatatcccgattatacgtgaagatacggtcgttggtgttgccaaaatcgctacagatattacgagaagagaagagacggtccatgatttcgcatctggtttaaaaagcatggcaaccaatttaaaagaacattccagtgttggaaaaacgcgcagtgaagctctccttgaactcgtgaaatcaatcacgaaagaatcaaatgaaaataccgatacacttcacgacttgcaaacagaagcgcaaaatattcacggcattattaatacaattaacggtattgcttctcagactaatttacttgccttaaatgcagcaattgaagcagcacgtgctggtgatgctggacgtggatttagtgttgtagctgaagaagttcgtaaactttcgagtcgtgtagaagaagcaattaaagaagtggaaaaaagtgtcaacggtatcacgcaagaaattaatactatttcaagtggtacggaacgtgtcgaagcaaaagtcgaggaaagccaagaagtccttattttatctttagaagattttagccaaattgaatctgcctctactgccttggatcaaaatgccggtgctttcacaaaaatgatttaaccgactgaaaaaaggagcgaagaaaccttgaaacttattggaaaacatccttctggtcgtgccattattattcgcttgaacaatcaagagtaccactatgaaactgcaaatagttttggaagcgcgacttcattaacacgagcaaaaacagaagcaagagctgatagttttacatctagtgaaatggatcaaggtttacatattggtaattggcactggaaagaacttggatgaaagaaaatcccgtctataaatatagacgggattttttatttacgcattcaatgcttgttctaattggtctttaaaggcggttgccacatcaaatacagtaacaaattggaaatcgctcacgttgtaatggacgacaaatttctcctcacgatagcgaaccataatggatgaacgaactttatcaccaattgcgtctcctgcttgagtttcgttatagaaaacccagtgcgttgcttcaattggattcgctgttttttctgcaagatcgcgttgaattaattgttttatttcatcacttaattctggcgcgaattcattgtcgatatagccgtaccaaatagttcggtagtactttgcttcaaattcattcgtttcatcaaatagttttttcatgtttgtttcctcctattaggtgttatttctattcgtgataccttttcaagcgttcttctaatgtaccagcgtgtaattcaaagagatgattatcaaagtcataaaaataaattgagcgtccctcaccttcgactctgggacgttctggttttatttccacaccaagagatttaatccgctcaatatattcatccacttcctcagattgaattcggaacgcaatatgattgtaagtttgctcttgtaaagagtctccttccataatgcaaatccataggccagcaattagaaaaaatttttctttggaaagcgaaaaagtctgatcgccactagaatagatttcttctgcattaaaaatttctcttaagaatgtggttgttttattcaaatctttcacaattaaagtgatatggcttaatcctgaaatcatgtaccaccagtcctttatttatcttttaactgcaaaagtactacggtctctacatgagctgtttgcgggaacatatcgactggttgcatatagcgaatgcggtattttttcgcgagtaaagccaagtcacgagctaatgtggatggattacatgatacgtaaacaagttgttttgcttccacatctagtaatgattttattaggccttggtcacagccgcttcttggtgggtcaacgattactgcatctgggcggaaaccttctttcacccatttaggtaatacgtcttctgcttttcctacctcataataaacattttcgatgccatttttctccgcgtttcgtttggcgtcttcaatggattctggaataatatccataccacggacttcttttacttttcctgcaaaggcttggccgattgttccaacaccgcaataagcgtcgactaatgtttcactgcctgttagtacgagtgctttttcgacttcttggtagagccgctctgtttggaacgggtttaattggaaaaaggcacgcgcggataaatcgaattcgagttccattaatttttcttcaatgctttcttttcctgctaaaaggaacgtttcgtcaccgaaaataagtgaggattttgcttgattcacgttttgcataatcgaagtgacttctggaagagctgcttcgatttctgcaagcatttcgcgttttttaggtaactttttactattcgtaatgaaaacgagttgtgtttcgccggtttttactccagtacgaacgacgattgtccgcacgatgccactgccagctttttcatcataaattggcacgccgtatttttctagtaagtcgcgaacaaaattcgttactttaatggtaacgggttgttgaacgatacagtcttcaatcggaacaagttggtgagaattggcaccgaaaagtcctgtttcgacttgaccactgcctaccattcttgtttgaaattgacttttattacggtaacgccacgggtcttccattccgattgttgggcggatttttaattttgttggatcgatttttgtatgtttttcgattgattgaataacaatatctctttttagttcaagttgggcgctataggccacatgttgcaactggcaaccaccacacgcctcataaactgggcaaggtgcggtaactcggtttggagattttttacggattttatttaattttgcttcggtgaaacgatcacgaactttgaccgcttcaacaactacctcttcaccggtaattgcgccaggtacaaatacaactgctttcttaaagtagccaattccttccccgttgattcccatgcgccgaatagttagcgggaatttttgtccttcttctactggattttgattcattattttcctccatcattccaagtcttcattaatactaacaaaaaaacagccgcttgtcagtagtttatggcatgatttcaagactttcatcgacaaggatgcttttttcgacagaacgaaccatcgaacagtattttggcgttagttttagtgctttttcaagtgctttagggtccaagataggtcctgttattttaaaatgaagatgtatcgcgcttatacgattttcttcttccgggatgcgttccattgtggcatctacccataaatcggtgaattccactctttttttctttaaaatgttacgaaaaacaatggcgctacaactggcaatagacatcaacatcaaatccgctggtgaataatcggtcattttgtcatcgatcaaaaaatttcctgtatcaaacccattttcggtatagactagctttaatggttttgtcattgttatccctcatttcttctcttttatcgtacaaaaaatctccttattaagcaaattagtagtataatgaacagatagtcgaccaaaaaaggaggctactcatgttatggaaggagtagaaaataaagtgattgttttagcaggaatgattggtgctgggaaaagtagctatacagagctaatcgcaaatgaactcggaacaaaggcattttatgaaagcattaaggataatcgcattcttgaaatgttttacgatgaccccaaacgatgggcttttgccttacaaatatattttttaaatacccgctttcgtagtatcaaagctgcattaacggatcaaaataatgtgcttgatcgaagcatttatgaggatgcactttttacacaaattaattttgaagaaggtaacatttccgagcctgagatggatacataccttgatttactcgacaatatgatggaagaacttgcatatatgcctaaaaaagcaccggatttgttgatttatttgcgtggaagtttagacactgtattgagccgaattgctcttcgtggtcgtccttatgaacaaattgacgataatccaggtctacttgaatattacaagcacttgcatagtcgttatgacagttggttcgcatcctatgataaaagcgaaacccttgttattaatattgacgaaattgatattaataaaccaaatgacgcagattatgtcatgcaactcattcatgaaaaattaaaacgctaaaacaggatttttactgttttagcgttttttcaattgatttcgcctaattcttttttctttttccgaatcgccagtgtagcgttaagctccccgccaatcatcaaaataataccggtcaaataaaaccataacattaaaataataattacaccgatactaccatatgttgccgaatagttgccgaaattatttacgtaatacgcaaaaccaacggaagcaactgtccaaccgattgttgaaaataaagctccaggtagaacactaatcaacgtactgcgacggtttggtgcgacccaatataaaaaggtaaagacaacaaagataacaatgagtgtaaccgtccaacgaagattattccaaaagctaagaaagtcctccgagaaattcaaatgattaattaaaaacatcccaatttgttgaccaaatacaagtaacaacaaggtcgccccaactgttgcaagcattgcgagtgtgaaaaacattgataataatcgttgtacgacgtaatttcgcttattggttacgccatacgctttattgagcgatttcatgaccgcgttcatgccattagatgccgaccataaagtcgcgataatcccgatagaaagcaatccgccatttttctgcgttaataagttatttaaattttcttctaaaaagtccataatctggtctggcgcgaattctttaatcatattaaaaacagaatctttatcaatatgaagataagcaagtaatgttgctgcgattaagagcattggaaaaatggaaaacagcatataataagctaactgtgctgcatttccagaaacatcatttcgccctactctagcacttactgcttggccgacttgaacaatcccgttttgtttaacatattttactacttttttccacactgataaggccccctgttctagtcattcgtctggaagtttttcttctattatggtaaaattttgtctattagtttgaaaggagcaaaaagatgaatcttgaaaccccttcgcaggaaaacttgaattttatgttaactgaaattactactaaactaaaaatggtgaatgttggtgtttttgaaaatctcgagcttgactctgttgattataacgcacttgtcgatatttatcagctaattaaacgcaaatccacttttagcccgcgtgaaatgcaattatttgcagaagaattacgccgggttcgaaaataaaacaaattccagccactttttagtggttttttgtttggaaatacttggtcccaaaatccactaaatctcgcatatcatagattttagttggcgctccgataatcgtcgttgggtgaaaatcatgttctttctcataagcacgacctaacgcgataaacacttcactattataatcaatttcctgatacttctcccaaatgatttcgccatttttaaggaaggcagcttggttttcgataagcggaaaagcattggagcgttcttccgctaaatgaagcgatgtattgttattattatctaccccaaacaagataattttcgcatcaagttgatacattttccctagcggcgattcatcccccatgctttttgcaagtggctggttggcaagaatttgttttttatctttcccccaagcacaaaacgaatggtatggatgaaaactgcgctcaacatctggcatggtacgaaatgtttcggcaatgacacccattccacgagttggtgttacaagcggatcaaatggcggtgtttctctgcgaattattttccaccaactttcaggaactggcggattttcccactttgcaggatcacttaattgacctgtttgagccggcattactatattgcctaattcaccaaccagttcttgcaatgccaaaataacggtaactggaccaccgcaaatccagtgtgcttttgacatggaggcatgaaaaataatcgtatctccctttttaatacccaattcttgtaggtccgacacgattttttgttttgttgctggcttttttgttcgccagatagccattttttctcccattgtatgtcaccgcctctaaaaataaagccagatgcctagaaaaaaacggcaaactaaaagcatttgtgtgaaacttgtgcttttacttgcattctgttctacatgcatctggctaatttaattaatcgttttcgccttgatacgttaaaatttctggaccatcttttgtgattgcaaaagtatgttcatattgcgcagacaaagagccatcaacggttctagcagtccagccattatcgtccattttggctttccaagcacccatattgaccattggttccactgtaataaccatgccttcttttaagcgaggtcctttgccagctgtaccgtaatgtgggatatctggtttttcatgtaaagttggtccaacaccgtgaccaataaactcacgtacaacagcaagattttcagattctacgtatgtttgaatagcatgaccaatatcgccaactcgagcgcctacttgtgcttgttcaatacctaaataaagtgctttatgtgttacatccattaaatgtttcacatcatcaggcacttcccctactgcataagtccaagcagaatcagcaagtgcgccgtgataattcacgaccatatctactgtaataatatcgccttggttaagcttttgtttgcgcgggaagccgtgacaaatttcgtcattaatacttgcacaaatagcatattcataaccttcaaagcctttttgctctggagttgcgccatttttacgtaaaaattcttctgtaaatacttctaaatcccagcttgtaataccaggtttaataatttttttaagttctttatgcgtatcggcaaggatttttcctgctgctttcatctcatcgatttcgcgtcttgatttgagtgtgatcatcttttcattccctcctaaaatttccactatttactattatagctcgaaaccccttagaaataaagtaatctggaaaaaaggttgcagtttttctgaagacatttataatagaaggtatcagttaaaaaatggtggactggtttgtgccattttaaacaataaaaaattcagaaaatggtgatgcaaaatgacaaaagtgatgatcgtttatgccagcatgactggtaatacacaagaaattgccgacattttaggtgaagaattagaaaaatacgatatcgaagtagaaattgaagaatgtatttcagttgaccctgaagatttactagaatatgatggtgctctaatcggtggctatacatacgatgatggtcagcttcctgatgagttcgttgatttttatgaagatatggcggacgttgattttagcggcaaagtttgcgcttctttcggctctggcgatacattttatgatgaatactgcttaacagttgatttagttgaaactcgtctaaaagagcaaggtgcgactgttcctgttgctgggcttaaagtagaccttgatcctgatgaagaagatgttgttcgcgccgaaagctacgcgaaaactttcgttgaggcattaaaaggataatcgcaaagcaagtcctctttttcggacttgcttttttatttattcaaaaatagcgaaaacagtagcgtagtggttgctttaccttattaattgagatacaattctcgtattgaataaaaagattggagtgattaattatgacagtatttagtgaaaagttagaaaagtatgcagaattgattgtaaaagttggggtaaacgtccaacctgaacagaaagtggtaattatggctccagttgacgcggctccacttgttcgtcttatttccaaatacgcttttgaagttggagcagaggatgtcattatggattggcgcgatgaagaattaggcgcattacgttacaagaatgccccactacgcgtttttgaaagcgctccggttcaccgtgttgcagaaaaaacagaacttgctaaagaaggtgcttgttttatttccatcacttccgaagatccagatttactaaacggcgtagatagcaacaaaattgcgactttccaaaaaacgatgggtggcgcaatgagtgaattccgcgagttaatgcaagcaaacgtagtaagttggacagttgttgcagcagcttcacaaggctgggcagcaaaagtattcccagatctaactccagcagaacaaatggaaacactttgggaagctatttttgaaacaactcgtatcaatacggaaaatccggtagaaacttggaaaaatcacgatcaaacactggctgctaaagcagaaagtttaaatgaaaaacaatttacttctttacattatacggctcctggaacagaccttacaattggtcttccaaaaaaccatctttgggttggcgctggtagtaagaataaaaaaggacatgaatttatggccaatatgccaacagaagaagttttctgttgtgcggataaactaaaagtggaaggttatgtttctagcacaaaaccacttagttatgcaggaaatattatcgatgacttcaaaatcactttcgaaaaaggtcgtattgtaggtgtagaagcagcatccggcgaagaaattttgaaagatttaatcgcgacagatgaaggctcacactatttaggtgaagtggcgctagttccagacccttcccctatttcccaatccggcattttattctacaatacactatttgacgaaaatgcttctaaccacttagcaattggtagtgcgtatgcatttaatgttaaaggtggcgaagaaatgtctcgtgaagaattagaagcagctggtgtgaacaatagtttaacacacgttgatttcatgattggttcttctgaaatggacattgatggtgtaaccgaatctggtgaagttgttcctgttttccgtaaaggcgactgggcgttctaatcctttttttaaacttatgccttttgcgtaaaacccttgtagcttttggctttcaagggttttcgtttgtttattttttataaaagagagcgaggtgcattggatgaaatttagtacatgggacatcaatttaaaagtaaggctttttggggaagcactactcgatatttctttttggatggtcttcccctttctaacgatttacttttcggaaagtattgggcgcgaactgacgagccttctgctaattatctcgcaagtgttggcagtcttcacagctttgcttggcggctattttgcagataactttggtcgtaaacggatgatgagtatttctgtcatcggagaaggctttggctttcttgtttttgcaataggtgcacttcatgttgtggattctccttacttaagttttgctggtttcgcgattgcgagtgtttttatggctttttatcagccagcaagtcaagcaatgattgccgatgtggttcctcctgagcatcggacacatatttattcggtgttctatatgatgattaatattgcggtcgttattggtccaattcttggctcggttttattttataatttcacgacagaaacactacttgcaattgtttgcgcggatttattactactctttttactgcaaaaatttggtcatgaaacagcaccacttttggttaatcctgatttacaaaaagaggttgttcggaaaagtatcggcgctgttttaatggaacaactgaaaaactataagattatatttaaagacaaaattttctttctttatattgttgccggaattattgtttctcagtcgtttatgcaactggatttacttttcccgctctatattaaagaagttatcggtgcctctaacttgttcgcatttcattttacaggtgagcaattgttcggggttattgtttctattaatggcttctttgttgcagcgcttacggtcgttgtcactcgttggatgagccattttagagaaaaatttgtctttatgaattcttcttttctctatgcgattgcgattttcttatttggtatttcgacaggaccgtggggagcgatttgtgccattattctctttagcttcgcggaactcatgactgttgggttacaacaaacttttgtttcccagttagctccagaagataagcgcgctatgtacttttctgctgctggacttcgttacactttgggtaaagtcattgctccacttgcgattacactttcgactttaattggctatactggcacatttactattattggtattttagcgctcattagcgggctcatttattactatatgtactcagaatttgaaaaacagcggcaagtttcctaataaaaaacggctatctactctggatagtcgtttttatttgattactttttttacgaaatttttacgaaatgccgaaaacacctgtcatatcgccattttaaattaccttttcatgtcatccatgtttaaataatgcttataaggtgaaaaaagtctatactgttagttgtacacctagaatttactcgctatttttaatagaaagttaggtgtgagaatgtttggaacaacaactattggaattgatttaggtactgcgaatattttagtttacagtaaagaaaaaggcattatactgaatgaaccttctgtggtcgcgctaaatacgaatgatggaacggtacttgcgattggccaggaagcaaaagagatgattggtaaaacgccgacttcgatttctgctgtaagaccaatgaaggacggtgttattgctgattttgatttaacgagcggacttttgcgtgagattatgcgccggatttcagttagtggtgtgagaaagcccaatgtggtcgtttgtacaccaactggcgcaacatcagtcgagcgccgcgctatttcagacgcggtaagatcaactggtgctcgttcagtcgttttaattgaagaacctgttgcagctgcaattggtgctgatttacctgtcgctgagcctgtcgctaatgtgattgtggatattggtggcggcacgagtgagattgcgattatttcatacggtggtgtggtttcaagcacttcgattcgcacaggtggcgatcatatggatgaagaaattattcaatacatccgcaaaaattacaaccttttaatcggtcaaacaacagcagaacgaattaaaatggagcttggttatgcgccgatcgaacacgtaacacaaactgcggatatccgtggtcgcgatttgcttactggcttaccaaaaacaatccaagtaagctctacggaaatccaaagcgctttagctgaaacattacaacgtatattagaagctattcggaatacacttgaactttgcccaccagaattaagtggcgatattgtcgatcgaggtattattttaagtggtggcggttcccttcttcaaggtttccgtgactggttggtagaagaaattgatgtccctgtacatatggctccaagtcctttggaatccgttgcaattggcacaggtagatccctcgtttttgcagataaattagctaaaaattaattgcagtaagcatctggtcgcatggtaacccttgcagccagatgcttctttatcttgctgaaaccccttatttctggtaaacttatttctggtgtctggctttctagagtcagataattttataataagcccatatagttaaacggatataacaagcccctcctaagggctagttcgtggttcgattccgcgtatgggcgctcagaaaaagccgaaagcacttgataaatcaagactttcggcttttttatcgttcttatttcaaaactttattcatacataaaaagttacatccttcttcttcgctgaaaatttcaacgtatattcagcatcatccgaaaatggtctggaagcaatttttacgctagtataatcacaactgttatttcttagagctgatttaattactttgatacctatttcttcatcaacaacgacacaaaatatatttaaagcaaattgcttgttgggattcgcggtttgtcctatgtcaaaaccatctacgattcctaagcccttccaacccaaattgtcatttaaaacatctgttactcgatctttcaaccaaatatctcgttttgttcctgttaaacttttaagcggatattgaattaatatccagaaattttcgtttggaggatattcgctataaccttgtgggacaaatcggttaataaacgcctcatgaaatgcagctttgttctcgtatttttccagatagttgctggtttcttctttctctcctaccttaccaactttaccgtaatgcacgattgccttatcattattaatccagtactcagcatacaagatttgattttgttcttttttgtatagctttaacatgttttcacctcatgatgtatataattgggctctgtattagagcattttatttattataacaaattttccatagctcgcaattattttctgaccgtatacaaaatccaattccctttctccttctccactacctccctaaagccaatttctttcaagagtgctgttagcgaggctgttgttttatattcgtccatgtgataatcaattttatctttttcggacgacagtattaaaacaccatcttgtgacatgacacgatagatctcttcaaaacctttttggggattatcccagtacatatgcgtttggatagcatacactaaatcgaaaaaatccgcttgataattcatcaaagcaacatcttgaatagatagcttcactgtgccattattgatggcttttttatttaaatttgtagctgttttataagattcttcagaaatatccactccgtaaatagtccaatttttatttagttcagctagatttttgacattagagcccccgccataaccaatatctaatacatgattaacattgcttagttcagtattactaattgtccacttactcaaatcttcaaaataggatgaccatattttcgtagtgatttcaccaataatcccacgcggattcgccgcttgttcgcttaaatagttaattaatggtttatataaaataaaactcaaaccgatgatacctcccaaaatgattagtgttattttctttctttttgttattttcatcataattaaagtcctttcacgggtctttagttttgaaataatagtaacattatttcaaaactattgtataataatcttaacttccaagtcaataacttttgaaatttattagttaatatttcaaattaaatttttttatgttatattattactaaagataagattagcttagggaagtgtttaggatatgaataattatgaaaaaagaacgctaaaaaagaagaccgcaattattcaggcagctctttcattatttggaaaacaaggtttttctgatgtaagtattaaagatattgccaccctcgcagatgtttcgcaagtgtctatttataattattttggaagtaaagaagcccttgttggtgaatgtgctcgcattattatgcaagataccattactttagcggaagaaattttagcatcagaaggaacattcacgcaaaaattagagcgggctctcaagctctgtaatgcagaaataaatctgtctttaagtaaatttatatcgcaagaagcaagtaaagacgcacaatttatcacgctgttagtgaataatattaatgcacttaaaaatgagatttatatgaaatatatcgctatcggcaagcaagaaaaaattattgatagccgtctttcggatcaatctattcaactttttattgaagcaattaatggtttaggtttcacagtccccgaggaagaacttgaggagaaacaagcggagatagtgcagttgtttttgtatgggttgattgggaaatgataaaaaaagaaaaagacctataagattgacaaagaatatgtcaatcttataggtcctttttaagtggaattttgtattataaatatctttcgactacaggaatgattttatccgcatgattgaaaatatcaatcacatcaacaatttctatggtagttttttcttcgtcatttattacaaaataggttcttgcattattaatgtataatcttaaaacccattttcttatactgttatctataattatattaaagtacgatttattatctctataaaaaattctagatgtatcaatggtatctttcaataataatttagttgtcgtgaatgcttcaatttctgcttctgttgtaataatatcttcttcctcttcagcatttgcttctacttgaggaacttctaaatcttctactgaaacagatgtattaagcgcagcatttagtttactattcacttgatctgcaataaattgtcgaaatcccctttttacaacaggtgtaaatttatcgataattacttttgtttttattccgtcataaatttctccaagaataaatttaacaaattcttcacttggatcattaacttctttagttaaaaattctttgacaaaattaagatattttaaatcagaagctgctttagaaatattctctacatcaaaattttctttttggaatttaaaaatttcagaaatttgaacatcctttatttctgtaagtacaaaggaaaagaatggcgttttatccatcttgtttggttcttccaaatcagtatagaatcggtattcattaccgttagttaaaatgccgaattttgctgttgtagttccaaaatatctaaacagctgcgaatcatggttttttaaatctgatttaatagatttcgcttcaattaggataatgggattgttattatttaaaatagcataatctactttctctcctttttttatccctacatccgcaacatactctggtgaaaattcgagtggattaaaaacatcatatcctaacagttgaaaaaaaggcataattaaggatgttttcgtcgcttcttccgtagctatcgaatccttaagcgtagatactctttctcctaatttctttacatctaataatagtgtttcactatccattttcatcgtctcctactttatgtattattattcacatttatttttaaatggaagaacattccatttagctaagtgtaatatatatttctttatacgtctattaattttaaaatattacaaaaaatagttttaaaatacgcttttaaagatgccggaataggtattgtttacaaaaagaagatagtaaaaaaagcagaaattctctagtataaaagaaaatttctgcttttaaaattattatttcttcttctcaaccaatctaaaatgttgccacggtagaatggtatctagtaaataacgctcttctgggacaattcgagcaacgatatttgtgttgccggagttttccatttcttgaagcgctacttgcatttcgcctttatagcgctcgtagccgtcgttgtcgatagtcacgtcgccttttgcaatagtatttgtgtcgtgtgcggggaaatcgaattgtttgaaattaacacgggtcattgttgaacgtaacacgtactcggaagcatcgccacgattgaaatgtttttgtgttaaaacgatttctttttccacgtcagttgcaccatctaaaaactctactgctaattgtaattcattacgatttaattcacttaaagcgcgtaattcgtcttcagaagcgaacatattcccgacaatgacatcatcaatcaggccagtgttccaaagatcttttgcttgaacagtaatttccactccgcgatgttcttccattgttggaagtccaccgtctacaacaaaccaagggccaaattcgccgctgttagaagaaacgaatgctgctgtgcgtaagtttaagtctttgaattgtttactcgtacgcaagaaatgttctctggaaagaccagtgtattttcttggatagaagttgtgacaaccaatgatatttcctacgtttgcttggtaagataggatattttctacgtaacgagtaccattactgatgtttagctcgattttcaagtccgtatcatcaaaggacattgctgcctcttcggaaccagagaaacctaaatctaggcgtaatccagctagaccaagctctttaaaacgatctaattctttataagtgatatttaacgattcaaatacagtgggatcaacgtcagcaataacgtcaaatcctaaatcttttgctcgtttgcaaatggtttctaatttagcaaattcagcttcgtcattagcagaaatcaaacaagtaaaaatacggctaaaaccatattttgcagctgtttcaatgtattccaatgattcttcaagcgctacatgttgtggaaatacggatattcctaattttctcatttaaatcatcccttcaaaagcttatttagagcggtataaatcaacaatttccttcgctaagtctttaaaagtaatagcgttcattaagtgatcttgcgcgtgaacaagtagtaatgatacttctgctttttcgccacgtgcttcaccttgaattaatgaagtttgtgaatgatgcgcctcaagtagtgccgcttctgcatttttgatttgctcatctgcaacgtcaaaatcccctttttttgccgcttcgattgctagcattgcgtcacttttagcgtttcccccgtgtacgattaattgcataattgtttgttctaattccattgtttacacatcctttttcatttatcgaacttgtgtttaattcctcttcaagcagtctcgaactcgagattatttctcaatcattgctagtgcatcatttagcactttttcgccgtccattgttccatagtcaatcccattaatgatcgcaactggaatacctaatggatccagtactcgcttcaaattcttctctaaaaaacgaacttgcggtgcgagtaaaacaacatctacgttgcctttgtacttgtcgaaatcagcttctgcaactgctataacagtagcatccacttgttgtttttcgatagcttctgtcattttttttacgagcagacttgtggacataccggccgaacaaactaacatgatgttattcattaatttaacctcctagtttgaaaagctgcacgtatatataatatgcaagatatgtgccaacttttcttcttgtttgttgcttccttacaaagtttttcacttacacaagtaaaaaagccaagtgtgtaagacaatacacacttggcagtttttttcttaattttcttctacctgattggagagcatcatctgtgttaaatatgcgatttctgattgcggtattacgatatcatactcaatttctacgttttccatcatttgttgcgtgatttgcatttctaccatatggtttttggcaaattcatttaagtctgggaattcccggtctacagcccctagttttacgcgttcgataaggaaagctaagtgcagaatcataccaatgtctacacctgactcaagtataacattaagttgcaattgtagttctgaaatcacttttcgtaaaaagtacactaattgctctgcagaacttactgcttgtaaatttccttctaatgaagcgattaatttttcatatggtacttcatcatttaaaattctagaaacaattcctaagccaccttctgatagaacttccagcgcgctaaagaatggaatatcgcggtattcaaaggctactgaacccatgatagctagaatattgtattcttccattagttgatcaattcgctcgcggaaagcttccttgtgcaagaattgtaatacaataatttcaattttcgtttcatcaataattggcgctacgactttgcgtaattgctcggctactccttctccagtaaaacaagtgaagattactgcatttttcacgggtttagcgcgtaagacatgtgctttatatttattttcaaatagttgctcacaactctgataaatatcttctaaaccacgacctagtgaagctttccgcatcgcttccagtacaactggtgtacttaccatcgtaacggtttttgtacggatacctagttcttcggtcagcatgttgccgaaagaagtgagtgaacccatatcagaaaggattagaacgcctttgactgggtttaatttgatgaccgtttgttttaatttttcatacatcgcttttacttcaacagtgagcggcatatcaagggcaatcccgctttcaatactcagtaattcctgtaccgtctctaccatactcgtagcagttgaacggccatgcatcatcacaataacttcgacttgattttcttgagaaagtgacgtatctactacttcttctgtcagaaacatcgttaaaaatccaatttcgtcaaaaggaatttcaatacttaattcttgttcaatcagtgcagataaatcaatagctacttggaactcttttgggtattttttgcgaatattatttaaatcgggatgaatgatatgcttttgttcgcgtacccgttcgatggtactttgtaaatgtaaagaaaaagcaaatttcattttttcgttatatttacgatttagtttttcttctgccatggcatatactttttctgttaattcccaaacagcaggtgcaatgatttctttggcagtttggtgggttggtaactggaccatgtagttgtggaaatattgatctacatcaacataaagtgcttcttctaactcgctttggtccttcccttctttcattaattgatctgctttttcttggatggcatgataaacatcatgaacatcttctgtttcaacaaattcatcactcgtatcaacaaatttaaaaatggctttgttcacgtcaatcaaacgatttaatttttctggttcgtcttttaagtggagtaaacctttttggacgtggataggcaagtcatcttgttcgattaatatataattagccgttttggttttataatgtaaaaatgctttggcacaggctagttttaagtctctttgcaattgaccgacgttagcacttgcatgataaagtaaaaaagcaatcaacgcttttctgtgtacacgtatggattggtgaagtcttgttgcttcttggttcaagaaaaactccactaattgataacgttcttccagatttcgttctgcaagggatggtaaggtaattgtcatcggtatacgtcttgtgaatgtttctaataaaaaattatctggtgattctgttgtcgccccaataatttggacttgtgcatgatgtacattcgcactttctcctagtggacgaaattctcctttatcgataaaagtaaagagcatttcttgaccttctggaggcaagcggtggatttcatcaaggaataaaatccctccgtctgcttttttcagcaaaccttcgcgcgtttcttctgctccagtatatgctcctttaattaccccaaaaatgtggccaaataaaagttgcggattttgtgcatagtcggcacagttaaacgaaacgaatggcgcgtcagccggaatggtttccgattctttcgcaaattgatacatacattcagcaaagagcgatttccctgtacctgtccgtcctagaattaagctgtgaagcccgtttggcgggtataaaatcgcggctttggcttgttgaatacttacttttaaactatcttctgaaccaatcaatcttccaaaagcagactcttgcatatttcccacatgttggttaactctttccgttgtttttatagcttgataaaataccggtttcccaggaagtttgtctattcttttctctttaaaaagatcatttagataacgactagcgtttgctctgtccatttgaagcaattctgcgacatctgcagcagatactttttcttctttttcgtttagaagttggaggacttcttcttttctactagacatctactctactcctttttgaaactctatgattccattatacctttttaaatggcatcctcgcaacgataaaaattaactaaaaaaagcgcgaatgctttcctatctatcaagagagaaaaacattcgacgcatcttaagattttttaaaattgtttggttttttgttgaatttatttggtttattacgtgtcggtttagccgagttagttggcttttctttacgccctccagcagctccagtaggtttgtctttgcggaacggcttcttcccgtcgtcttttttacttttttgaacttgttttggcggtcttgatgcttttttagcgattttgttttctggaacagcaccgtcaagaagcttcccttgataaaagcgaacctgtttcccttttaagttgtggatggttaaatattgttttaatgttcttatttcacgtgggttagcgaaagtaataaccgtacctgatttacccattcgcccagtgcgtccagaacggtgtgtgtactctttttcgcttgctgctaagtcgtagtgaatcacgtagggtaaatcttctatatccagcccacgagccgctacatctgtcacgattaaataagtcaacgtgccttttttaaagtcgtccagatattttttgcgtttttctttgcgaatttcgccgtgaattccagctgcttttactttatcgtaatgcagtttttctagcaaaatttccattcgtggtttgtcttttacgaaaactaagccgcgcatgtctttaatatgcgaaatgcggcgcagtaaagtagctttatcacgtgattccacatccatgtataagtgttccacattcgttaattcttctggttttgcggttacctctagcattactggtgtgttttctgtttgtgcaaaaaacatgtccggattttctagttttgtcgcggatacaagtgtcaattggcgatcacgaacagcactttcaacaatctcaagtgtacttttaaaattttcttggcgaagtaattggtcacattcatccaaagtaatcgttttgatttcatgcattttaattttcttttgtttgattagttcaagtgcgcgacctggagaagccacaataatttgcggttttttctttaatttttcgatttgacgtttgacattggctcctccgattagagatatcaccgtcaagtcatcacttggtaaccacgaacggattacttccgtgatttgcattactaattcatgtgatggcgctaaaacaagccattgtgtttttggaattgcctctattttttcaagggttggcagtgcataagccactgttttccccgttccagttggtgatactgcaagtacatctgcaccgtctttgataggttggtacattgcgctttgaatttctgttggcgtttcgtaaccatgttcttgccatttttccgcccaaaagcttggaatatttgattctgtcataacccgactcctttattagttcttctctgtatcataccacgcttactgcaagtctgcacttttatttagtatttttgtcgctagaaaaaagtaaacaagagccatcaaaagattaaaacccatctggataaaattaaaatgaacacttgaaaaaagggaataataaaaatggatttctgtgctacttttaggtaaaaaatctgttccgatagatatttgaattgcattaattattacaaagtagattaatgcgccaataaaaccaacgcggaaaccattgactggcaccatactcaaagcggttgctaaaaaaatgatacaggctaaagaaaaagtattaagtcccatcgctaaaaaagtgtcaaaaatgatatttagtcctactgaaaaagacatctccgcgccacctattatcgccaagttaattataattactagaacccccgccgttagaatagccgtttctattaagacgatgattaatttattcaatagtattttccaaataggtgtttctgtttgaaaaaacaaataacggttttcatcgtaaattccagatcgagctgctgccaaaaataaaagtaaccaaatgagtatccaactagcaccaacaaagcctattaaagctatgaaaacaccatcgccggacgcgaatacaactccgtctatatctgaatccatcacaagcggctctaataagccatttcctaatttagaaaaaagaccaataagtaaacaaatcagccaaccaacaaaagtagcaaaaaatatgtaacgatgcgcgttccattctaatttccagtgtgctttaagcatgcccaaatacctcccgatagtaatccatcactgatttcctgtattcttcccgaagtgtttctgtgtctatttgctctattatcttacctcgtttcaagaagataatttcatcaaacatcatttccatatcttggattaagtgtgttgtgacaacaagtgttgcatcttctttaaggaacgtcgcgatgcttttaattaggtcatctcgcgaaatcaaatcaatttctgaaaatggttcatccagcaaatataagtctacatctcggcatagaataagtgccaacattacttttgcagcattacctttggataaatatttggtattttcttttatgttgattccaaacgaacggatcatttgttttgctttttcttggtcaaaatccggaaaaaagctgtgataaattcgaaaatagtcgcagataaccatattaggtaaaaaatcttcactcggcaaataggctattttgctgttttctgctaagtttattgttccagatgttggtttaagtagacctgaaattgcatttaacaaagttgtttttcccgcaccattaggaccaagtagcccaatgattttccctttttgaagagataagttaatgtcatttaatggttttctttttcgatattttttcgttaatcccgtaattgtaatcaggttttcattcatggttgcggctcctttttattagtaattctattgctgcttggtcatctaaaccgatgctcttcgcttcttctaaaaagcgttctgtaattgcatctgctaactctatttttaattggtcgaaaagtgctttgtcggaagtgacgaatgatcccatccctcgttttgcataaatataacccgctcgttctaattcttgataagcacggctaacggtattaggatttactgcaagctgtacgcccatttcccgaacagaaggcaacttatcctctcccttccattcgcctgtaatcatttgttttttcatccagtcagagatttgactatagattggtttatctgcatgaaaagtcggattcattgttaactcctttttaaacgaaactagtgtattaattaaatagtacactcggctttcatttattgtcaagcacaaaaaaactaggaatcagcatgatagctttttcctagctcttcaaaattatttttctgcgtcaaaccaaatatcattttggtgacgaagttcgttggagacacgcaatacttttaagcttaggtctgctaagtattcatatgtatctcggtcgctttgttcgataattctagcaaactctgctgcttcaaattgcatatcattggctacaactgggccagcgagttcagtttcttcttttgtcgcattatcgtaaaaagtaattttttcaattccagttagaggatcaacaattagcgttcctttttgaccataaatttcgcttggcaggaaggactgcgaatttttcccttgaatgatagtaatattgaatgttgggtattcgagaattattggtccaagtccgtctacaccagttggtaatttagtggcaaaataagttgcttttacaggttcaccaaatagtgtaatcgctgagtaaagtggataaacgcccaaatcaacgatagatccgccagaaaatttcaaggagaaaatatttggttcttccccgtttaaaacttgatcgtatctggaagaatacttcatgtacgctagtgttgccccatgaatagtacctactttttcgatgttttcttgtagccgtttgaagtttggctcttgaatgtggcgtgctgcttcaaataaaaagacattgttttcgcgagcaatttgatgcgcatgctctaattcggctacggtagaaaaaatcggtttttctacgataacatgttttttatttttcagtaagctaaccgcatgttgataatggagcgcattaggagaagcaatgtagacagcatcaagtgcatctgatttgcccatttcttctatatctgtgaaataagtcaactctccatatttttctccaaatgcgcgtgctttttcttctgttcgtgaatataccgcagtaagattccattcgcctgaattaatagcaccttcaataaaagaatccgtaatccagttcgttcccataattccaagtttcattagccaacagctcctttaattttaccttaagtataccttaaaataaggaaaaaagcgtactaattgtttgaaacggacggtccactgattctagttgtatagattatttcgttttcagcttttccaccttcaaggagttccactagtttatctgcagcaactgcgccccatttgtacttcgaatattcaatagtagcaagacgtggaactagatattcacttatgtcggtattatcaaagccaataattcgcacgtctttaccaatttctaaatccgtaccagcaaaataacgatacattccaattgccatgttatcatttagagcaaacactgaaacaggagccttccaatttttggcgataatggacgcagctctttcaccactttcttcggaaaagtcgccttcaataatatgcacttttttatcaccagaccgagcaagttcttgtttcgccgtttcgagtctgactcttgcatcataagaatcgtctggaccggtaatgacatagaaatcccctttaaaattagtagataaataatcaatcgctagcgttgcgccgcccttattatctagaaggacttggctcacattttcatgggtaagttcccggtcgagcaccactaatttatgaccacgattagcatagttaatgatttcactagacgggaaattcgcatctaaaataatagccccatcaatcattttctcgggtaaaaatcggtgtgttttcgtaccactacaagcaatgagctcatatccatgtttatatagcgtttgcgttaaaccttccagtaaagtcccgtaaaaaatcccgccgtagttcgttaaatagacgccgataatttttgtctctcttgtttttaacgttcgtgctgccatattgggaatataattcaattcatttgcgatggtcataattcgttttcgcgttttttcggttactttcgggctgccattaagcgcgtaggatactgttgaaatggaaacccctgcctttttcgcgatatctttaattcctaccacgtgaatcgcatccttttctgttttcttttattatacacaaaacaaccttagagacggttatttttttgaaatttaatcgtgatttgtgaacattttgtcgttaagttctttttcggtaaaattagtgctccagttcggtacaaattcgctgcattttcaactggttgtttctcaccattaacaacaatacaaccctcatctgaactttcgaaagtaagatcaagcggataattatctagttcaatatgacattctaatccatctaattcctcaggtaaaattggatcaaagataagcgtctcttccgtttgacgaataccaagaacagaacttattaattgatgtaaatagattcctggaccactagaataaatcctccagccgcctttcactggaatactaccttctttcacacgactaaattcattttgtgcctgatagcgatctaaaaatgctgcatcagaactactgaaataagtattactttgacgaagtgccgcatttggaacaacttctttaatgttaattggattaatgacatcaagcatatgccaagcggatttatcgccaattttagctaaggcttcaatataacgaatatgcgcatgcacgtattgcaaaccaacctctcgtccgaaattagcagcttgttctgcccgtttgaaatgagtacttacaccaccagcataatgcgctggctcgctcattaatcttacgccatcaggatgaagtaaatgctcaccgataatttcaaaattacgactggcttgctttttatcgactaattcagaaatcacacttcttgtcagtggtattaagcgatatttaatgttcgtctctttatcttctgggtgaatcatccatacaggtgcttttccttcttctaaataaaggaaacctggaataacatcggtatcatttgtcatatatttcgcaaagtccgcttgaacattgtttgctaacgtctcgtatttctcacctactggtaaaaatgcagctaaacgtttaaatgtttgataagttagcgcgaccgtccagctggacaccatgtttttcttaagctgggcattagctggttgaagtgtatcatcccagtcaccatcgccgtaattagaaagagccgttcctttcataaagcgtgcttcgatagttttcactgccagtttaatgtgttcaagaagagtcccttgctctttcgtaaaggttttcgattcgcgatcaacataaggaatagcctcttctaaaatctctgtatccccgctcatttccaaataatcaccaataattttcagtggccaaacaataacatcaccgtggctttcttcttgctgaatcgatgtatatttatcaaacataaaccattgtggccaatcaccagtatcttgatattgatgagaaaaaatggtcaacactagcttacgtaaaacagctttattgcccgttgcaaggaaaaattcaaatggaccttgactcacatcacgcgtaccccaagccgccccgctgtattgctctaacccatgcggtgaagcatagtgcactaacatttggtgcgcataccaataaaccgttaaattcagcttttccgcggttgtactttggtgatttaaatggaactgtgcagttaattcgtcatagctagcgcgaattactttgttgtcggcttctaaatcctccgttggtttagaaaattcatcggtaagttttgcttgaacgtggaaagtcgctttatcacttggttcaaaaacaaacacatccaaacctgctgttcccatgtaatcttttgcaaaataacgttcgtcagtcagttcattataagttccatctacgcggaattgaagctccggataggtttctaaaatcggcgagtcatctgcagggaaataagtgacgattccgtctttaatttcttttttcacggtagtatcgtattcatttgttcccatagttacttgatttgttaagactaatttatatgagttacctttttctgaatgaacagtaacgaatgcttctttactgtaagctgttaatgtggtttgtactgtgattaggtcgtcattccactgataataccaagtcgaataatttgtactagtttcccagacagacggtacgctgagtagtcgtagttcggaatctaattcgatataaattcttaatccacttgtttgaagaatattaagcggattacgcgcgtggctattccatttgttcatattcgtatttccagcaactaattgtgataaaaatgccccgtacatgtacgttgttgccgaaagggtcgcttctggatttaaaacatcaattttatcaagtaaaatactgccatgcggccgttctaattctgcttctttttcacgcatcacaacatgtgcatagttcggtgtgaaaaaggaaagcagtgcggcgttttgcttctcttcttgaatccggtctgggaatttctcttgaagccagctgtcagaaattgtttcaccggtaattggtgttcctatatgtttgtttaatatagctttagtacttttttgataggattgctctgaaatattactttttagttcagctaaatttccgattggtgctccagatgcttttggttggttttctgttacataaccgtaaaagcttgtttcgccgtgattagtaaatagctctgtttgtatggaaatttgagcgaattcatattggtagactcgatttggcaatgatttttccttaaggttagctagttcgctagtcagtttataattagttccataaatatcaaaaccatccgttgcatacccaacaatttttgttaatgctccaatttgaactgctgggaagcattcattttgtggttgattttggcgggcttgaaccgtgaaaccagtcgcgccttctgttacatgataatcaatatattgcgacatataagcttcatttgttctcactgccgcttgttctgcaagccccaagtcttgtaagtaaacaagatcaaattcaaaatccccatccactatgacatcataaaaccaaccgcgcgtgtgaaaatgcatttgcacgctataacgaaacggtccaactacaccgcgatactccacaccattttcgttaaaaccaacttcagaatccttgttaagtagcggataaatttctattttatccccaaaatgcgcgcgcacatatatttgcgataagcgattttctaatggattttgaatcacttgatttagcataatatccttcaattttagccaagcaagttccccgctcggataaaatgcggctgataaatccgcttttttaatttcttttaacattgtcacacatatccacccacttccagttcaaaagcgtctacatcttcactactagttccaacaaaaatacggtgaagtcccggttcctgcactttttcaagttgatggttatagaatgaaaatgcctcgcttgttaattcaaatgtaactgttttttcttcgccagcttgaagcgccactttttcaaaagcttttaattctttgacaggtcgtgaaatgctcgctgttacatcttgtaaatacacttggattacttcttttccagcaatatcactaatgtttttaatggttacttccacatgtagtggttcgcctagatttaattctttcggaaggctgcttgtttttaactcgaattcgctataactttttccgtaaccaaatggataaaatggttcatttggaatatcaagataatgcgacacatagcgttcgcctttattttccggtgtttgtggtcgtccagtgcgtaagtgattataataaaccggaatttgaccagttgtttgcgggaatgacatggataatttccctgaaggattacttgcaccacttaataaatctgcagtgacacggcctgcttctgttcctgggaaccataattcaagaagagcatcactagattcagctaactctttcacttcgagtggtctaccattaaataatgtaataacaactggtttttctaatgtttggacgaatttcgctaattcatattgcgcttccggcaagcgtatagtagcaagacttcctgcttctccgccccattcatttttttcacctagcgcaagcacgacaacgtccatattctgtactgccgctttaactgccactttgtcttcatccgaaaattcagtgtactctgttgaaatgacctctactgtttcaaatacttcacgcaaacctgtttcaacattgatgccatctttttcttcgccgtatacattccaaccaccgagaatatctggcgacgatgcaagcggaccgaccaaggcaatttttgtttctttagccagtggaagtaatcgatttttattttctaataacacagcggattcaacgcctgctgcacgcgctttcccgcggctatcatcggttaaaatatcttttgtgcggtcgttattttttaatccgcgatatggatcttcaaatagtcctaaatcatttttcaaatgtaacatacgtagaacagcttcatcgagaaggctctcggataattttccttcttcaattaaaccttttaattcatggatataacaagtagtcatcatttctaaatcaacgcctgcttccatcgaaaactgtgcggcttctttaggatttcttgctgttccgtgattaattacttcggcaaccgctccccagtctgaaataagaactccgtcaaagtccatctcacctcgcagaacatcacgatttaaccatttattcatcgtagctggaaccccgtctaccacattaaatgcagtcatgactaacttagctcctgcttgaattgccgcgtgataagcaggtaaataattctgatataattcgcgtgttgacatattgaccgtattatattccagaccagcctccgccgccccgtatgccgcaaaatgtttcacgcatgctgccatccgatcaaaatttccatctaatttacttgcatcaccttgatagccatctaccatcgcttttccaagttcactatttaaaaatggatcttcaccagttgattccattacacgaccccatcttgggtccctaactaaatcaagcattggcgaaaaagtaacatgatgaccgtccgctgttgcttcaagcgccgaaacttccgccatcacgcgcaccgtttcccggtcaaaagaacaaccaagtgcaagtgggattggaaataccgttttataaccgtgtatgacatccgccataaaaacaagcggaattcctagtcgatttgtttttaaataagcttcttgaattccaatcatatcaagtgccgaacttgatccaagcaccgaacccgcattttccgtatgcgcatccgttaatttcatttcttgaagaagcggccctgttagttctgcatttttgtttgtacctttaaaaagaaaaggggaaagttgaagacattgagcgattttttcatctaatgtcatttgattgactaaatcctgtactttttcttgtttcataggaacctcctgaacacttttttcgaaacgtttctattcaaatataacaacagtataagcgctttcttttctttagtcaaccaaaaacgacattcacatggtgaaacgctccttttttccgtttcttctatactatctcgttttcataaaagtttatccagaaaaaaattacatccacaaaaccattggtatgcaatactctataactataaacaaaaaatataatagcaattcacttgaaaccgattacataatatactataataaccttgtcgaaacgtttctatgaaatattgtgtatgtgaattgattttcacaatttgcttcatcccgtacggcgcgcaagttctgtacaacagtttttattctttaacagcttttagttaatcaagttgctttgaaaaaaacaaaaaatggaggaaaaatcatgaagaaaaagatgtttgtcgttttagctttagtgttgtcgcttagtttagtattaatggcgtgtggtgggtcaaaggatgatgcaaattccggcgattctaaagtattaaatgtttgggcaatgggtgatgaagccaagtccctaaaagaactcgcacaaaaattcacgaaagatactggcattgaagttaaagttcaagttattccttgggcaaatgcacatgataaattacttacagccgttgcttctaaatctggccccgatgtagtccaaatgggaactacttggatgcctgaatttgtcgaagctggcgcactacttgatattacaaaagatgtcgaaaaaagtaaaaatatgaactctgatttatttttccctggttcagtgaaaacaactcaatttgatggcaaaacttacggtgttccgtggtatgcggagactcgcgtgttattctaccgtacagatttattgaaaaaagttggttataatgaagcaccaaaaacatgggatgaattatctgatgcagcgttgaaactttctaaacgtgggaaagatatgtatggctttgcaattgatccaaacgaacaaactactggtttcattttcggacgtcaaaatggctcccctcttttcgataaagacggtacgccagtattcaataaaaaacctttcgtagacactgttacttatttagatagtttcattaaaaatggttccgctccggatactgaccttggtttagatgcttctcaaagctttggcggcgacggcattgtgccaatgttcatgagtggtccttggatggtaaatacgctgaaagacactgcccctgacattgacggaaaatgggcgactgcggtattacctaaaaaagaaaataacgaatcaagccttggtggtgctaacctttccattttcaaatatagtgataagaaagatgatgctctgaaattcatggactacatgagtcaacctgacgttcaattatcttggttgaaagatactaactccatgccagctcgtatggatgcttgggaagatgatatgctgaaaaacgatccttactacaaagtattcggtgaacaaatgaaaacagctgaaccaatgccacttatcccacaatttgaagaaatcgctcaattatacggaaaatcttgggaacaaatttatcgcggtggtgcagatgtacaaacacaaatggatacatttaacgatcaagtagaaacccttcttaaaaaataacgaataaaaagggcaaatgattctagtctgccatttgcccttttagaatggaactgatgttatgaaacaatttttaaataaaaacacgccatatttgtttatttcgccagcactgtttttacttcttctgttttctctacttccgattttgcttgcttttgtcattagttttacagatatcgatttagtcgggcttgccgattattctaagattaactttattgggatagataattacgtcaatattatgcaagacccggtatttttaaaatctatttttaacacgcttttctatgtagttattggcgttccactggttatcgtttgctcgcttgggattgcgctgatgattaacttctcgcaagcgaagattttccaatttttccggttaatcttttacactccttcgattacaaacgttgtcgctgtagcagttgtttggagttacttatataacccgcgctttggtttacttaattatttactttcatttttagatctcggacctgttccttggctacaagatccaacgattgcgaaactctcgctgattatcctagctgtttggcgggcaatcggtgtcaatatgattattttcttagcggcacttcaagggattccgcgcgaatactacgaagctgcctcgcttgatggtgcaaatagtcgtcaacaattgtttaaaattactgttccaatgcttcgtttcgccattttctttgtaacagttacaacaatgattggttggttgcaattcttcgaggaaccattcgtcatgacagagggcggaccgctggatagcacgaactcggttgcactgtttatctatcaaaatggtttccaattaagtaagtttggttatgccgctgctggatcgtttatcttgtttattgcaattatcatcattacgataattcaattccgtattcagcgtaaaaataatggcggggatatttaagagaggagtgttataaatgaatcaatatagacaaaaatcgcgcggcgctcaaattgccgtcattagtattttaaccgttggcggattctttatgattttaccgttcatttggatggttctctcctctttgaaaacggatgctgaaattttaaaaatcccgcctactatttggccagaaacatttacactagataatttcaccaaactattcactgaaatggactttgctatttacttgaaaaatacattaatcattgtattcttctcgtttttcggtttatttttaaatgcgatggcgggttacggctttgctaaatttaaatttaaagggaaaaacaagttattttatcttgtccttgctacgatgatgattcccggacaagtaacaatgattccggtttacttgctgcttaatgcggctgggttaacgaataccatgacagggattgtacttccaggacttgttggtgcattcgggattttcttattccgtcaatttatgtccaccatatccgacgatttacttgaagcagcaagacttgatggcgctagtgaattttatattttctggcggatagttatcccaatttctcgacccgttcttgccgttcaagggattctcacatttatcgctggttggaactcgttcttatggccgttaatcattgccaacgacgaaaaattctacaccctatcagttggccttcaattattaaaaggtcaatatggcagcaactatgccttacaaatggctggagcaaccttcatggttattccaattatcttgatttttatgactttccaaaaatatattttaaaaggcttcaacgtttctggaatgaaataattagtcaaaaaagagcttacccttttaggataagctcttttttattatggtaaaaatgtttcacccatcaagtaaaagtctacttcacgagctgcttctcgtccttctgcaatcgcggttacaactaaactttgaccgtgacgcgcatctccgcaagcgaatacgccctcttcactagtacggtaaaatcctttggctgcatcaatcgtatgacgatctgtttttcctacaccaaagtttgtaaaaatatcttcagttgttcctgcaaaaccaatcgcgattaaaaccatatctacttcaaagtatttttcgcttccttctacaggtgtatattttctttctgccttattttcttctacttctacagtatgcaatccaataagatttcctgcttcatctttttcaaaagaagttgtattaataaggtactcacgtggatctcttccatacactgcttccgcttcttcgtgcgcataatccattttgaaaacacgtggatattgcggccaagggttttcgccatcacgcaattcaggtagtttatcttgaataccaaattgataaatactttttgcgccttgtctgagcgcagttgccacacagtcagcacctgtatctccaccaccgataatcacaacattcttacctttagcagaaagtgtttgtatcccgccgttatccagattatcacgcgtactttgagataaatacggaacagcgaagtgaataccagctgcgtcacgtccagcaagtgggatatcgcgcgcatttcctgctcctgtcgcaagaacgatagaatcatactcttcgcgtagttctgcaaaagtaacatctgtccctgctgcaacacctgtgacgaattcgattccttcttccgccatcaagttcactcggcgcgttacttgttctttttccagtttcatcgttggaataccgtacattaataacccaccaatgcgatcacttttttcaatgaccgttacgctatggccagctttatttaattgatccgcgcaggcaagtccagccggtcctgatccaatcacagcaattcgtttaccggtacgttttttaggaggagccggtttaatccagccttcttcaaaacctcggtcaataatcgctttttcaatggatttaatccctacagcaggttccgaaatagccaccgtacagccaccttcacacggcgccggacaaatacgaccagtaaactctggaaaattatttgtttttaaaagtagttgtaacgcttcataccagtcaccccggtatacggcgtcgttccactcaggaattaaattatgcaatggacaacctgatacgccatttttaatttccatccctacgctacaaaacggcacaccacaatccatacatcgagcggcttgtattgttaaatctgctaccggcattggtaaactatattcgttccagtcacgtgtccggcttttcggatcacgtcctggagagggaattcggtcatattccataaatccagttgcttttcccatgatctcactcctctctatttcgccactccggcaactaattttccatctttatgttcataaaaagcttgtaattctgcttcatcgtgtgtttttccagtttgttcaagcgtcgtgattctcgtcagcatcatttcatattcatttggaatgacgaaaataaaattcgctttctctgcttcccaattttgtagaatatcttgggcgaaatcacttcctgtaaggtttgcatgttgttcaattagctgttttaatttagttaattcggatgtgctaaaagtagagcgactatttacaagttcatgattgattttggcagttgttgcttgtttattattagtataaatgtaagcaaccccaccagacattccagctgcgaagttctccccaatgtcaccgagaacaactaccgcacctcctgtcatatattcacaaccgttgtcgccaataccttcaacgacagctgttgcaccactattccgaacggcgaaacgtgcacccgcttttccgtgcatataggcaaatccacctgttgcaccgtaaagcgttacatttccaacaatcgcggaatcatgaggtttaataggtgtcttagcatccggactaacaattaatttaccacctgaaagtccttttccgaagtaatcattggcgtcgccgtgaattcggagcgtcatgccgagcggtgtataagcaccaaagctttgaccagctgatccgacaaaatcaagcgaaatggtatcttctggtaaccctgccgctccgtattttttactaataaaggaaccagcaatcgttccaatcgcgcggtcaacatttcgtacagcgaaagttccagttactttttcaccgttttctagtgctggctgaattaatggcacaagttcgcgcatatcaagcgtttggtcgattttgtggtcttgttgttttgtacaatattggacttggtttttataaaaatcatcactataaagcatattcgaaaagtcgatatattttgctttccaatgcgcttcttttttctcgtgagtagttaaaaattctttatgtccaatgatttctgttaaacttctaaagccaagttccgccatcatttcgcgcatttcagcaacgataaaatggaagaagttcacgacataatctgccgaaccactgaattttttccgcaactcaggattttgtgtcgctacacctactggacatgtatccaagtgacaaacacgcatcatgacgcaaccaagtgttacgagtggcgccgttgcaaaaccaaattcttccgcgccgagcatagcggcaactaagacgtctttccctgtcattagtttaccatctgtttcgacaacgactttgtttctaagaccgtttaatagtaatgtttggtgtgtttctgccaagccgatttcccacggcactcccgcgtgtcggatacttgttcttgccgccgcaccagttccaccttcataaccactaactaaaataacgtccgcgttcccttttgctacacctgcagcaatcgtgccaataccagttttcgaaactagtttcacattgatacgtgcattttgattcgcatttttcaaatcaaaaatcagctgagataaatcttcaatggaataaatatcatgatgtggtggtggtgaaattaatcctacaccagttgttgaaccacgcgttttcgaaatccatgggtagactttatttccaggcaagtgtccaccttcaccaggtttcgctccttgagccatcttgatttgcagttcctctgcattgaccaagtaatgacttgtaacaccaaaacgaccagatgcaatttgcttaatagcacttctacgccaatcaccattttcgtccggagtaaaacggttcgggttttcgccgccttccccactattacttttcccaccaatacgattcattgcgatagcaagcgcttcatgagcttcttgactaatcgaaccataagacatcgcgcctgatttaaatcgtttgaaaatggcttcggccggctctacttcgtccagtggaatcggtttgcgatcacttgtaaaagttagcaagcctcttaaaaaggcattattttgattttgcattaaatctgaataaagattatacgtttcacggtcattttcacgggtagcttgttgcaaagaatgaatcgcaagcggattgtatacatgatattctccgtttgagcgccactgatattccccgcctgtattaagtgtgaaactttggtagccaatatcatgataggcttcgcggtgacgaagccaagcttcttgcgcgataacttccagtggaatcccaccaatttgtgaggctgttcccgggaaataatttctaatcacatcatcgccaataccaattgcttcaaaaatctgggcaccacggtaactttgcaccgtagatattcccattttcgacataatttttagaataccatctgtaatcgcttcaatataacgactttccgcctcatcaagtgtaaatcctttaatccttccttctttaatcaaaccgtcaaacgtatcgatagcaaggcttggaaataccgcgtctgccccgtagccaattaaaagcgcacattgatggacatctctcgcttccgctgttttcacgataatactcacttgtgtacgcgtaccagctttaactaaatgatgatgtaagccactgacagctaacagagaaggaatgccaatccagtccgcattcaccccctcatctgataaaatgagcaattctgccccagctgcgattttttcatccgcttctgcaaataatgcttccaggcgagcttccaaaccatctctttcctctgctttaaataaaattggtaaagtgacagtcggttgggcaaattttgtttgttgctcaagtgccgcaaattcttttcgagataaaattggtgttttcaagcgaatccggttagcattttgagcagttggatttagaatattaccttcatcaccaagtaacgtcatcgctgaagtcaccgtttcttcgcgaatcccatcaatcggagggttggttacttgcgcaaaaagttgtttaaagtaattaaataacacttgtggtcgttggcttaaaacagcaagtggtgcgtcataacccattgcgcccattggatcttttttctctgttaccatcggaatcaaaattttatttaattcgtcttgtgtgtaaccaaatgctcgttgttttttaaaacgttctgatttatccattgcttcataatgtaaatcggctgctgctaaatcggcaatttctgtcatttccgcttccaaccatgcacggtacggtttttccgttgttagttcttcttttaattcagcgtccgccacaattcgaccttcttctaaatcaattaacaacatcgttcccgcgccaacagtttctttgcgaataatctcactcggatctactggcacaacgcccgtttctgaagaataaataatcgtatggtctttcgtttcataataacgagccggacgtaagccgtttctatccaaaattgtcccgattacacgaccatttgtaaaggaaatcgatgtcggtccatcccaaggctccattagcgtactatgatattcgtaaaaagcgcgtttcggatcagtcatatgcggatttttatcccaaggttctggaataagcatcattgccgcatgaggtaatgaacgccctgcttgcactaaaaattctaacgcattatctaaagttgccgagtcactaccgctttcatcaataattggcagtaatttggctaaatcttcaccaagtaaaccagattccgctcttttctcccgagctttcatccagttgacattaccacgttgcgtattaatttcaccgttatgaattaaatatcgataaggatgcgcccgctcccaactaggaaaagtattcgtcgaaaaacgagaatgcactagcgcaaaagccgatacatacgctggatctgctaaatctaaatagtattgattaatttgttctggcagtaacattcctttaaaaataactgttcttgtggataaacttggaacgtagaaagtctctgtaattagcttagaagtcgcagcaaacttttcgatttgctttctaattaaataaagtgctcgttcaaacccagcttcatctaacttggcatttttttgaatgaatagttgataaatcgctggttctgtttttcttgcaccagcacctacctttgttacatcagttggtaatttgcgccaaccaaggaacatttggccttcactcgcaatcagtttttctgtttcgtccattaaacattcacgttctgttttattttgagggaaattaaacatcccaacagcataatgatatttttcaggtaaagtaatacctagtttgctacattcgcgtcggaagaaagagtctgaaatctcaagtaaaataccagcgccatcgcccgtatccccaccaacttctccaccgcggtgctttaattgacaaagcatatgaataccttgttcgacaattttatgagaagaaatctttttaatatttgctacgaagccaattccacaagcatcttgctcattttctggattgtataggccgtgcttttttggcaaattagtttgtttcatcctagttcctcctcttcaaaaaccgaatccttctgagtctttttggtaattatttaaattaactgataattaaccagcgattcagcttaccttacatttcttgtagtatctattttattccttttcatttatcgaaacaatatatataatagaataaaacaatctcatttcgagaacaatcggaggtaagaaatggaactacgacaattaaagtattttatggaagtagcccgcgttgagcatatgaccaaagctagtgagaatttacacgtagcccaatctgccgttagtagacagataacgaaactcgaagaagaactcggcgtgcatttatttgaccgtgttggtagaaatatgcaactcaccagtgttggtcaagatttcttaaaacaagcagcaatcgcattaaatgaactacaaaaagccgaagcactcgtgaccgaatataccgatcccgcaaaaggaactgttcgcgtcggcttaccgaactccctgtctaccaaagtgttgccatccgttatttcgacctttcgggaaaaatatccgcaaattacctaccagtttatggaaggcaccaatgaagaacttaccgagatgctcttaagcggcgtccttgatatgacttttttatcgcctgtcccagaatctagcgaacaaattgaagccattcgtttttttgatgaaaaattaaaactaatcgttccaaaaactcatccacttgctgaaaatttcactgtttctctaaaagagctcgcttccgaaaaattcgtgctttatccagaagactttgatttatataaaatcgtaacaaaagctgccaataaaaaaggattcgagccacaaatagcatttcaaagtagagatttttatacgattcaaggacttgtcggagcaggccttggtattagtattttgcccgaaatgattttagatggagcgatttttaaggaaacgaaaagtatcgctttgcgtgataaagaattgcggcgttcggtcgggattattacgacaaaaaaacggaacctatccccttccgagaatttgttccgttcgtttattatttcgttcttttcgaattaattattttcagaaaatgctgctggataatggatagttccagctaagttttctaaactaccatcatataattctaatagcataaagtattcagcaggcacgtcaaatggcgcaggaatagcaaactgctcagaaggaataaagccaaatcgcggataataatcagcatgtccaagcacagcaatggccggatatgctttttcgcgtgataaacggattccttcttccattaatctcgagccaactcgtgtcccttgatatgcaggtaaaacagcaagtggcgcaagtgctaaaataaatctgcttcgtccagctgcttcaagcgaaatctcactaaacataatgtacccaacaatcagtccatcttccgcttcggcaacaagagataacgccggttgataataatcagatctccgaatactttcaattaagtctgcttctactgtacctttaaaagcttcctcattcacacgacgaatggcctcgtaatcttgtggttgttctttccgaataatcatttttacttagtcactcgtttcattgccatactatcttctaactgtttcatcgcatttaacaccacatcagctgtcatttcacctggcatcatatggattgtttcatgcggttccgttgcacgtctagatacgtccacaagcgtttcttctgcaagtgtcgcaagccccatatcatacaaactcatcggaagtccaagctcagaataaaatggcaacaaacgctcgatttcatcccatctattttctattactaattgaactaaaataccataagctaccttattaccatgcaataagtgatgtgtttctggaaccatcgttagcgcgtcatgaatcgaatgcgctcctgcacaacgtccataatcatcgccaaaaccaccgaccattccaccaactaaaatattcgtctcgataattttaacaaacgcttcatttaacacttgtttatccatggcagcaagagcttctccactatattgcagcaaattatcacgacacattttagctgcaaagtgcgcgatttcaatttcgacagatttggtcggtaaagaatttataatcacatctgcttcataccatttagctagcgtatcaccgattcctgcaattagtaactcttttggtgagtctaaaatcatttccggatcaattaataaaagcgcattactactcgcaaacacatcgtaacgaatcatagcgccctcttcgtcgtacatcacactaagtggtgtataagcggcacaagttgatgcaagcgtcggtaagataataactggcaaacgtaaaactgctgctgccgctttacatacgtcagctattttcccgccacctactgcgataatcgcatccatcttatttgtttccatgattgccaccagacgatcgcgctcctcgtaggtagaaccaccattatatacttcaaaagtagatgtaacagttgataaaacagggaatttctttttagcgacttcccaagaagcatttccacgaactactaatacatttttcaaaccgcggcgttctaggtgagtaggtaatgtatcccacgcgcctacttggcataaatattcttgcggagctccgcgaacaatcaattctttattcaacaaaatcatcccttctgtctggcacggtcggatattcggctgcgacatttataattcaaattgtataggaacttaaacctactgtcaatcgcgctattgcttagcgatttcgtcatcaccaaaccattttttactaatttcttgcatttttccttctttgtataatttttcaaaagcttcattgatttttttttgcagttctttatcacttttgcgcattcctacagcaaaatctgtggcatcaaaaccgcctgttataatgttgtaatcgtctttatttttttgtttatcaatgtaataacgcgcgtatacttcatcaataattagaccatcaatccgtttattatttaaatcgataaaagctgtatcaaacgtatcgtataattctggttcgttattatttataatgtctgttaacacttctggttttttcgccatatcatcgatggaacttgccccattttgcgcaccaagcgttttatttttcatatcgctaaattgattaatattgcttgattttaaagtaactaatacttgttcatttttcatgtaaggttgactaaaagcgacttgttttttcctcgcgtccgtcacagtataaccattccaaattaaatcaatcgatccattctttagttccgattctttcatcgtccagtcaatcggtgtgaattttgctttgatgccatattctgcaaatacagctttcgcaagatcaatatcaaaaccaaccaaattatcgtctttatcacgaaatcccatcggtacaaaactatcatctaaaccaattacaacttctttatctttttttattctactccactggtcctctttagattcactgctggaacaagctcccagcgctaacatcaccattaacattacagttattaataatccttttttcatgttagattgcctccttttttagtggttctacttccatcatttgatccgcaactttttcggcaaaagtgtgatcatgtgtaacgataatttgcgtaataccaacctttttcaaacttaaaattaatgctgcaacatgatcgcgcaagtcaggatctaaagcggatgtcggttcatcaaatagcagcactttgggattcatcgcaagcgctctggcaatcgcgacccgttgtttttgtccgcctgataattggtacggcatgctatttgctttatcggctaaatcaagtaagccaagtaatcgttctgcttctttaacggcatctgctttctttgttttccgagcaagcgtcggcgctaaaatcaagttatctaaaacacttaaatgcggaaataagtggaattcttggaaaacaacaccaatcgtattttccacatcttttctcgacattgggtcaattttttcaccatcaattaaaatttcgccggcatccattttttctagtccgctaatacagcgaagtaaagttgttttcccgccaccagatggaccaacaatggaaagtatctcgccatcttgaagtgtaatattcacattatctaaaattgttttttgatcaaattttttcgataggtttttaatttccaacattttcttcacctcatttataataactaaaacgtttttcaagttgtttaaataatacagttagaatggcagttaatgctaagtagattgctgctactaatacgagtggaatcagtgtaacatctctactcattgcaattttcccagctcttagtaaatcgccaattccgagaatgtagactaaggacgagtcttttactaagttaataacttcattcccaattgctggtaagacacgtttgacaacttgtggtaagacaattttccgaagtgtctggccgtaagtaagacctaaaactttggcgctctcatattgcccattttcgatggaaagaaatcccccgcggaaaatctctgcaaaataagctgcataatttaaaataaaagcaataaacacggcatccattcggtcaaaaacaaccccgataatcggtaagccataataaataaaaattaattgtaaaagtaatggcgtgcctcgcataatccagatgtaaatatttaaaataaatttaagtggggctattttgctgatattcccaactgccacaaccgccccgagtggtatcgaacaaactaacgtaactgcaaaaacgagcagtgttgtttttgccccatcaagtaatgctggtaaaatctccatgatataatccataattcttcgctccttttttaacataaaaaaatcccgtcgcacttggcactaattggccaagaggacgagaataatattcacgtggttccacctcaatttgctgatacttcgcagtatcaacctctgttagttcgagactaacaagctataacgggcttaacccgagttcacctactcacttatgcttcagcaaaccagctccgagatgtgttcgataacgctatctttatcctttcacaccaaccaaggactctcttctaaagaattacgctctacttgttctgttcgacgcttttacttcttcttgctaatactctaccacgataaagcgatagagtcaaccgttttatttacaaaaaaagtgatacgccaatcataattggtgtaccactttttattaatctttggcaatcagtaagtaatcatctttctgttcaaagtagattttcacttctgttcctacgccactctcagattgaatacaaatttcgtgacctagtttctttgccatttgtttagctaggtataaacccatgcccgttgcttttttctcttgtctaccaatattacccgtgaaaccttgctcgaaaacacgtggtaaatcttcttccttaattccacgtccattgtctttcatgtgcaaaactttcttacccgatgcttctgtatcacaccaaatttttacttcgccaccactttttgtgtatttgagtgcattggacaagatttgatccaaaataaaaccaagccacttactatccgtccgcacatccatatctacattttgcaaatccaatttcattttcttcccaatgaaaagtttagaatgacgtttgaccgattcgcgcactactactccaagattttgctcctgaataaaatagtcttttgagaatgtatctagtcgtgaaaaataaagtgcctgcataactaatttatctattgttgttaattcttcatcaatttgcttgaaaattgtttctgtatcatttaaatcaggattgttaattaacattttacttgcaacaactggggtttttacttcatgtacccagtataaaataaaatcatggtattcttgctgtttatcctgtagcttactaattgttcgtaattcttctttatgtttcttcgccattagttggttaaaaaaggcttgttcgcgagtacgtggttttggtagtaattcaatgatattctcttcaatctccccgctaacaagttccttcatttcgcgccaataactatatttaaagaaatagcccagcacgagataggaaagtaagaagactaaaacaaaaacatacaagtaaatgaaatttccaagcgttaatttactgttcggatcaatcgaaatcaacacgcccacaaaaaacataatactacaaaaaaacaataagaaaaatcgcttatcttttaaataactccaccaattcatggcgcacctcctcgctactaattagtttacttcatttgaaataatttgaaacgtagcaaaatcaaacaacccttgatcggttaattttaattctggaataactggtaatgttaagaatgacaatgttaaaaatggatcaaaaccgttagctgtactaatctgtttaaaggcatttaaaagacccgctaaatcgttttccacttcttcgtatgatttatcactaagcaatccagcgataggaagggctaaatcatgaagtacctgaccagctccgtttactacagcaatcccgccacctgtttgagtaatatgatcaatagccgctttcattgcttcatcactaacgccaacagcaacaatattatgagaatcgtgcgcgacagtcgtagcaattgcgccttctgttaaaccaaagccttttacgatacccactccgacacaaccagtatcatggtgacgctctacaactgccattttgagtaaatcgttttccacggttggaacaaacttaccgccttgaatagtcacttgttcgatacgtttttctgtaaataagctattgggttgcattccgattacataacacgtttctttggtcaaaggtaacgctaaatcttgtaaatgtacatgatgattaattggtggagatacaaatggtactgctgcttgttgcttaaaagctgcttcgttacgaacaccattatccacgactacttctccatttttcaaaactttactaatttctactgtttctatatctgttagaaaaacaatatccgcttggtatcctgcagcaactgcaccaaggtatggcaaattatgacaattagcagcattaatggttgccatttggatagcggtaattgggtctattccatttttgatagccagtttaatgttatagttaatcgatccttctgtaattaaatcattaattagtttatcatctgtgcaaaagcaaaaacgatggctatttttttcagatacggcaggaattgtttgaagtaaatcacgacctacagttccctcacgcaacataacaaacatcccagcacgtaagcggtctgtcgcctctttcgccgtggtgctctcgtggtctgtccgaatgccaactgccaaataattattcaaatcagcgctagttaggccggcaccgtggccatcaattcgaccgccttcttttttagcatcgattattttccttaaaatatcatcgctgccctttgctacggacggaaagtccattacttctgcaaggccgattactttttcgtgtctataaagtgggtggagtttctcggcgtgtagtgtttctccattatgctccccttccgttgcgggaacgcttgaaggaagcattacaaacatatctagtggagcccctttggcatcttctagcataaactcgattcctttttctccagcaacattggcaatttcatgcgggtctgtaacaatcgttgtaacaccatttgggagtaagacacgggcaaactcagcaggtgtgaccatcgcactctccacgtggacatgtgcatcaataaaaccaggtgcaataaaggcaccggcagcatctattatcttttctgcatctggaaaactaccaataccagcaatataaccgtttttgatggcaatatctccgtccattatttctcctgaaaagacatttattattcgtccattttttatcactaaatctgcttttgctcgtccatcacttactgcaactcgttcttgcagttgttttaaattctccaccaaaattcgcctccgtcaattaagcttcaaagaaaccttcatcaagcaaataaccttccgcgctttcaagggttgggaaaactgcttccaagttctcccccgtataaataacccacattttattttcatacactagtgaaagtttttcgccactattgtcttgatatattttagttagaccttctttatagccatcctcgtcactatccatgaattcttttgcttctaatagtaatacgcgtatttcattttcggagtaatcttttacattcacatagccttgtttgtcgagtggctctacctctaaaaatggtgcataaacaaaagcattgccgtttggatgaagatgtttgacgatgattttcttatctcttttacttgctggatagtgcacgttaatacgacccatagaaatttcatgtaattcaaaaccattgatagattctattaatgcttttttttcttcaaagtttaacatagtgttatttttcccccaaattaattttcttttaaaatatctgtcactaaagccggtaaccatacttttaaatcattaaaaacaaaaccagcttcggtagctttcgcattatctaaataataggttttttcaatgccgaacggggaatcatcgacgtcatccgtcacctcttcaactagtgctaattccccgattttttcttcaagcattttgataaaaccatttaacgcgtatgtgccattggaggtagcgtttactggacctgtcagatccgattccacgccaacccactctaaaaaatgtgccgcttcatcagaagtaataaagccaatctcagcttgtccattactaattccaatttcttggtggtttttaatatgattaatatgaaagtgaaggcgttttgtgtaatcgtcaagtccaagcacgattggaaaacgaactgctacaactggaaaagaagctttttggaaaaatacggcttcagcaagtcgtttcccttcaccgtaatcaaaatcttctttatcaccaataacaatttcgtaatgctctggattaaagtcagcctcaactaaagctcgacctttttgactataaacagagagtgatgatgtatatatgtatcgttttaccttgcctttaaatgcatctacggcataaagtgcttctttcggagagaaacatatattatcgtaaataacatcccagtcttcttttgctaattggaataaagcatctcttgattctcgatttaaaacaactcgtttgacagtatcaccaaaattatcttctgtttttccccttgtgccaatggtgacatcatgtccttctgaaacaagtctttccactaatttcttgccaaaaaaacgagtaccaccgaatactaaaattttcatttggactcctcctccatttacgaaaaacaggaagttcgcgtttttttagcgctatctccctgttttttcgtcattcaatcatatatccttggcctttttttgttttgataaattcgctcaaaccaatttctgcaagttttttacgaatacgaacaacattaactgtcaatgtattatcatcaacaaaactttcatcttcccaaagtgcgcgcataatttcatcacgacttacaatgctacctttttgtttcattaattcatataaaatcaaaaattcatttttcgttagctcaattttatcttctaaatgtgtaagtgtgttcgtatcaatgtgtaggaaaacattattatgctccattacatttgcttcttctaaatctgcgtaggaatatgttcgccttaatagagcatttatcctcgccattaaaacatccagatcaactggtttttcaatataataatctgcacccatgttcatgcccattatttggtccattcgcgaattacgtgatgataaaaagataatgggtacattcgaaacttctcggatttgattacaccaataaaaaccatcaaagaaaggaagattaacatctaaaataactaattggggttcgaaagctaaaaactcttgtaaaatattgttaaaatcctctactacaccaatctcaaatccccatttacttaaatgttttcgaattgtatcacgaatcacttcatcatcttctacgatatatacctttaccatttctagtgcctccctcggtggaactctcttctcattttagctgaaataaccacaaaagccaattactttttattggccatcacaattttggtaaaagaattgatacacaaaaagtaatacgccgtataacagacaatataaatacctgtaccaattaataccggatattttatattatccattaaattaatagaaataccccacagtgcagccatggaatgcgcaattccaaaaaataatggaataacaaaaatcggccatacctgcttggaaataattttccggatttctttttcagtaacccctagtttaaataaaatctcaaacttgcctttttcagaaacagcatctgtaactaatttgaagtaaatgatacttcctgttgctaaaaagaatacaatgccaataaaaatacctataaataataatgaacctaccactgtggagatcaagtggtaattcgtataataggaagaaacattgtccgagaataatgaaggctccccgtcaacgattgtttgcactttcttatctaagctctcactatgattcggattagtaatatcaaacattgtcacagattcagggcggaaaagtcgttccaaatcatcataatattcatcggaaacaaccagcgtttcataagaaattcctgtattaaaaattgaattttctcggaaatccactacttttattggtggcattttctttgcagctgatttatttgattgaacgaccattttacgagtaagccatttttcttgaatgtctggccttgcgtaataagtattttttccaagtaagatcgcttcaccataggcaatttttttagattggacaaaatcgctctgctgcctttcaccgatacgattatattctgattccgatacaatggtatgaatgaatgtatccatatgcattttatatttaggaatatctttatattccacttcagcgctaagcatctctgcttgcatcaactttttcaatttatgatcttgatcatcatgaatcgtttgaataatctctttttcatttttagcagaaatattgagcacttgataactggagggattctccgctgaaatatcattaattgtacgcacataaaaactactcatggagccaataatcgttaacgttgtcgcactaagtacagcaatcatcgcaatcgtactagcatttttctttaacctaaaacgaagcgatgtaatccccagcacattcgtccctttataaaagaaacgtttattattgtatagttgtcgaattacataaggggtgccaaacctaaccatcagccaggttcctaaaataacgcaagcaagtatcactaaaattaaatcaaaaaaaccataggctagccaaataggcgattcttcaatattcctcgttgccacatagtatccaaaagcgattaaagctaacccaattaacataaaaaccagcgaacctttggctactttttcttctttttcatcatttttaaatagctgattcaaattataacgtaatacaagaaaaacagcataaacagatgtgaaaagcatgataccaaaaaagaccagcatcgtatcgataatcgctttaaaagaaataataaattctgcatcaatcgcaaggccaactatccaaaataagaccattgcaaacaatttagaagagaaaattccaattaaaacaccaaaaatagttgcaagcatatatagcatcgcattttcaaaaaataatactaatacaatttgcgattttcgcaaaccaagtaatgaataaagccctatttctcgttttcgtcttttaagaaaaaaactattggaataaaatataaaaaagataataaacaatattaacatgagactagctgacgaaaacatggccggtccgaataactcccaacgtttaaacactgtgtcaatcagcgggttatacgataacgaaacaaacgtaaaaaaaactaatacacaaacaattaacgaaacaaaataaacaatatattgattaaagttctttcgcatattggtcagcgcgactttaaataacatcgttttcgccacctccaagaagcgccaaaacatctaataccttctggaaaaattgttttctagaacttgtccctcggtagatttcagtgaaaatttcgccatctttaataaacataattctttcgcagtaactggctgcaaaagcatcgtgcgtcaccatcataatagtggaatcacgcacatcttttgcttgagagagtccttctaataaattggtcgctgatttggaatcaagcgcgccagtgggttcatccgcaaaaatcagcgttggttcagtaatcattgctcgacaaaccgctgttcgctgcttttgtccaccagatatttcggttgggtacttgttccttaactcaaaaatcccaaattgacgtgcaataatttcaaaccgctgatcaatttcagcttgtttaatatgagcaagagccagcggtagaacaatattatccttcacagtcatcgtatctaataaattatagtcttgaaatataaaaccaagctgatctcttctaaaaacagctaattcttttccgttcatggtagaaatttgctttccaccaatctcaatttctccagaggttggtttatctatagaagacaatacatttaataaagtagatttcccagcaccagagggacccataatgcctacaaaggagcctttttgtatctctagactaatacttccaagcgcagaaaataaatttccttttgaaccgtatacttttctaactttatgcgcctttagcactgtttccattgtattcctcccgttacgttcttatttggttattttaccttaattttaaacaagatactatgggctatagttgtatttattaaaaaaatcatttatccgtaaaaaaacagataaatgatttttcttattatttcttttccacaaagatttccattccaatggtttcgtcatctgtataagttgaacgcatcgattgaatgagtttttccagttcctctaaactaatagaaacatccgcagcaactatgtcccatgccacttcttcccgcccatttatcgatgtcataattattaatctaccttgtgaaaaaagcatcattgctggttttttcagttctgtttttttaatttcattccatgatttaaaatcaccacgataagcaactccacgttctgttaattctacggtgggagcgatattaattaaccgaaacaatggacgtaacacacaaaggccgataaatacgagtaaaatcatttcctctatgccatttacacctttgatatgactaaaaacaacataaagtaataatccaacagccatccaaagtaaacaacttgaaaaaatcaaacgtcgatttaccccaaattcgattttctccgttttctttgcatgttctaactcattttctatcattattttcctccagttttacagctctattatttctattgtactaaaaatatactacaatgggaagaaggcattcatgtagctttttaatttaaagaaatcagcctactttcagttgacctttttggcatttgtgatataatttctttaatgcttttaagtagtaaaatgtaataatccaataaaggaggagaacatcatcgatcaagttatcttaattggcttcatgggagctggaaaaacaacggttggaaatatactcgcaaacttagctgacttaccgtacatcgatattgacgaagtaattacaagcgaacaaggaatgagtgtatcggacatttttgctaaatatggtgaaaaagaattccgccgtctagaacatgaaaaattaaaagaattagcaacaaccaaagccgttatagcaacaggtggtggcattgttcttaatcctgaaaatagagaagttttaaaaaatacatatccggttatttatttagaaacggatcccgaagtatttatgaatcgcttaaaaggcgacaccactcgaccgctcgtacagcaaaaaacagccgaagaaattcgtgcaattttcgaaccaagaattgctcattatcaagattccgcagattttattgttaatacggataatcgtaatcaacaagaagttgctcaaactattttaaccatgttagataagtaaaaaaacagcgctaaaattagcgttgtttttttattctgtgcaatgtctacaccacatacctggtaacacagatgtatagtcttttgtaaatgttaataagtcataaaacatactgtccgcataacctgcgtcaatattttctattttgttcaattctatttcgcgatgaagtgattccagtgccgcatcacgaagagcaggtaaaacatagcccgtgattttgatttgagctaaagctgctgagacagtaattctatcggatgctcgaacatcactgccaaactcaaccaaaagttgtttcaatcgctctacatcatcgtctttcgctggaacatagcttgcttttttcactgtttccatcatgtatttcggaaatgacgataaattgagtccttgatcacttttatcactaaaatattcttctaaacgtcgaagtacttcaagtccatcttcatatccaaatgggccatagctatcctgttcatccaaataaaaactcgctttaaaatgttcgttgaaatgtggatgtgttgtctcacgatttaacgtggcaccaggctggtcgatatacatagtaattgccattctcatttcctccattcatgtgaaatctcttacattcatcttaccagactatctacctttttgaaagaagaaaaaaaggtgacaatttcatgacaattttaaggatgattttcgcttttattgtattttaattaactataccagatgaaattagttaattaaattggttctattctcataaaagttaatttttgctcttttgaccatttatttatttcgtggttaaataaagctggacttggtttttattaatctcgtctgttgatttattagtcaaccacacactcgaaaaacaaaaaccgccatttatcccattatggcggtttttgtattcttaatttaaatgtaaaacagtcacagcttcaatatgtgtcgtcattggaaacatatctactggttggacttttttcgctacatagccaccatctgttaatattttcatatctcgggctaatgtcccaggattacaagaaacatatacgactttctttggtttcattgccaaaatagtttcaagtaacttttcatcgcagccttttcgtggtggatcgacaactaagacgtctgctacaatgccagctttataccaagatggaataacctcttctgctttccctgtttcaaaagtagtattcgctaattcattgagttctgcatttgcacgagcatcttgtatcgcttgatccacaatttctaccccatagacatgcttggcttttttcgcgagacaaagggaaatagaaccaatgccgcaataagcgtcaatcactgtttcttcacctgttaactcagccgcgtcgattgcttgttgatacaaaacttctgtttggagcggattcacttgataaaatgaacgagccgaaattgcaaaacgaataccatgaatcgtgtcttcaataatatcttttccccaaagtgtttttgtacgatctccaaaaatcacattcgttttatgtgggttaatattttgaacgatagaagttaattctagttgttcgaccaaatcacgtacaatttcttctttaaaaggcatacgttcttttgttgttacaaggacaatcattaactgtccagttgtatgcgcaaatcttgtcataatatggcggatatcgccttttcctgtttgttcatcataaggctctgttccgtatttagctaggatttcacgtgttttttgaacagcaaaatcaccttgctcattgtgaattaaacaggtcgacatatcaataatggcatggcttcttttttgataaaagccagctgttaacttaccattaacaaaacctaccggtacttgtgatttattgcgatagcgccacgggttttccatacctagcgtttcaggaacttctacgtttagtttaccaatgcgtttcatcgtttcttccacttgatttcgtttgaattcaagctggccatcgtagcttaaatgttgcaaactacaaccgccacatttggaataaaccgcacaaggaggctctacacgatttgcactaacagtttcaatattctccatccgagcaaaaccataatttttatttaattttattatttttgctgtcactttttcgccaggtaacgtatttggaatgaaaaatgggtatccgtcaattttgccaaccccactgccgtcatgcgttaaatcttcaatagtaagttcaatggattggttcttttttaaaagggatgcttccaaagtcccttgcccctctctttgctttacttaataatatattcgatgccgattggttctttaattactgcttcttcttgctctttaaaaacaagcatagtatttttttgtaacgtaaaatcataaacaaatgtttttggatagatggtaacatttttattcgtgattaaattttttgtgttatctgtaatagtcgtttcttctggaatttggctattaaaaatatcagctgcgacttcagcatcatcgcttgaatagcttgtatttagagatactttgatatcattgtttgttgtttcttctatttgtacaggcgttttttctgtctgtacagaacgttcaccacttgtaatttcataattggcgaactttttctgaatcgttgttgttgggtaacgatattttgtgttagtgatatactcagaaactttctttgcttcaatacgaagtcgatatgctttaatatctttataacgattatcagaagaagctaattcttttaaaatttcttcattagttgtttctaaaatcaaatctccattagatgcaatcgttgtatttgtatttgttgccgggatagataaaataattttatcttgtattggaatttgcatttgattgtttatccatactttattactttcaattagctctgttttacttacttttggagcctgttcttctgcatccacttgccaaaagaaaaaaacagccgctgcgatagcaatgataagaacgattattatcatcgtgaaccttttaaattgatgtccacttgtcatatcgcattcacctcatttcttgtcagaatacctattatacttgttttgctcaaataagacaaatatctaacaataattacatcctttttactatgttgcaattaggacgtttaggctaaagaaaaaaactaccaagcagggcagttttcagctattttcttttatgaataaatcagttgctggaatatcatccacactagcaaaaaattcgatatgttgtcttaaattgcggaattccatcggggtttccccgccaagctcgccgtcaagattaatcagcatcttgtcttctgaattgacaattactttttcggattttacatagataacatttggttccttaatatgatctcctcggagcgccagtgtgactaaacggataaattcggctaaattgactttttttacgataataagcgaaaatttaccatcatctagcttagcatccggagcaattttttcaaagcctccaatggaattagttaatcctaataggaaaaacatcacttccccttcaaacacgccttgatcatattctacttttactttggttgcttttaaggatggtaacatttcaattccttttaaataataagcaagttgtcctagcattgtttttaagcggctaggaacatcgtaagtgagttctgttaaacgacctccgccaccaatattaataaaataagtttcgtttgctttacctatatccattgctacactttgaccagctgctataatcttcgttgctttaatcacatctctaggcacgtgtaaggctcttgcaaaatcgttggttgtcccggttggtataatccctactttggggcgatattctttttcggcaataccgttaatcacttcattaatggttccatctccaccagctgctacaactaaatcaaatcgatttcttacagcttcttcagcggcatgtttggcatcatctggctctgctgtagtcgcgtgcgcagatgttacgtagcctgcttgctctaatatcgaaaggacatctgcaaggttttttttaatgatttctcttccagatgtaggattataaataactcgagcgtgtttttgcattatgtttgtcctctccttcactcaaacagcgttgttcaaaagaaaagcgcgttttgacacatgatagtaatattatagcaaatttcgccataaattcctaataaataaagcagtgaggcaaatgcctcactgcccattatttaacgtttgttcatttcttctagtaataatttattaaccattggcggatttgcttgccctttggttgctttcattacttggccaactaagaatccaacagcacgatccttaccatttttgaaatcgacaatggattgctcattgttatctagaatttcgctgatgatagtgcgtaaagctccttcatcggaaatttgaacaagtcctttgtcttttactacttgctctgcatcgccaccattttgcgctaattcgcggaaaacttttttagcaattttagaggaaatagtaccggcttcgattaatttaatcatgccagcaaggttttcaggagttagtcctgtttcatgaagctctttttgttctgcgtttaagtaggcagaaacttcgcccattaaccagttagatgcttgttttgcatctgctccagctacaagagttgcttcaaaaaagtcagacatttctttcgtaagcgtaagaaccattgcgtcatatgccggtaaaccaagatcgttaatgtaacgaatttgacgtttatctggaagttcaggaatttctgcacgaatacgttctttccaagcgtcatcaataaataaatctactaaatctggctctgggaaataacgataatcgtcagaaccttctttgatacgcatcaaggaagtttttccagttgcttcttcaaaacgacgagtttcttgttcgataatgccgccagacttaagcacttctgcttggcgtttttcttcatattcgatacctttacgcacattgttgaatgagttcaggttttttagttctgttttcacaccaaattcttcttggccgattggacggatagagatattggcatcacagcgcatcgaaccttcttccattttcacatcggatacgccagtgtattgaataatagattttaatttttctaggtacgcataagcttcttctgcagaacgaatgtctggttcagaaacgatttcgattagtggcgttccttgacggttaatatctactaacgaataaccatgagaagtatgcgtgtttttcccagcatcttcttctaaatgaagacgagtgatgccgatttttttctttttgccgccaacttcgatttcaatccagccatgttcgccgattggtttatcaaattgggaaatttgatatgctttgggattatctggatagaaatagtttttgcggtcgaattttgtatgttcagcaatttcacagttgattgccatcgctgctttcataccgaattctacagcacgtttatttaaaactggtaaaacacctggcatacctaagtctaccacggttgtatttgtatttggttctgctccaaaatgagctggcgcagaagaaaatatttttgaattggtttttaactctacgtgaacctcaagtccaataactgtttcaaaattcattgctacgccccctataagtttggtttttctttatggaatgttgtttcctgttcaaaagcatgtgctactttgtataataacgattcttcaaagtagttaccgataatttgtaagcctactggtaagccatctgagaatccacaaggaacagaaatagctggtacgccagctaagttaatcggaacagttaaaatatcattggaatacattgtaattggatcattgatcatgccgtcaattttgaaagctgttgtcggagaacttggtccgataattacatcgtagttttcaaatacgttaataaaatcttgtttaattagcgtacgtgcttgttgtgcttttttgtagtaagcatcgtaataaccagagcttaacgcatatgttccaagcataatacgacgttttacttcatcgccaaatccttcagaacgtgtttttgtataaagttcttctaaagtagtcgcatttggagaacggtatccgtaacgaacgccgtcaaagcgagaaaggttagaagatgcttcactggatgctaaaatataataacttgctacaccgtattcagaatgcggtaaagaaacttcatcccaagtcgcaccaagtttttcaagtgttttaagcgcatctaatacagcttgttttacgccagggtcaaccccttccgcaagatattcttttggaacacctatgcgtaagcctttaatgtctcctgttaagctatctgagaaacgctctactggttgattaatggaagtagaatcgtttgcatctaaaccagaaatcgcttctagtaaatacgcattatcttctacatttttagtaattggcccgatctggtctaaagaagacgcaaaggcaattaaaccaaaacgagatacacgaccatatgtaggtttcattccgactaccccacaaaaagctgctggttgacgaatagatccaccagtatcactaccaagcgagaataatacttcgccggctgcgactgcggatgcactgccgcctgaagaaccaccaggaactctggataaatcccatgggttatgtgttttgtggaaatacgatgtttctgtcgaggaacccatcgcaaattcatccatgtttaattttccgatattaattgtttgcgcgttttttaatttagaaacgacggtcgcatcataaatcggatcgaagttttctaaaattttacttgctgctgttgtacgtaaattttttgtcacgatattatctttaattccaattggaagacctgcaagcatgttgtttggatctatgccagcatctccaagctcttctgctacaccaaatgctgcttctttatttaaagtaataaaggaaccaactttgtcctctacagattcaattcggttgaaagattcagatactaaatcaaatggtgaaatctcttttttaactaatttatcatgtagctcttttactgaaaaatcaaataaacccaaaatattttccctccttagcctctttattgttccataattgtcggtactttgaacatgccgtcttgctcatctggggcattttttagtacttctttacgatctaacccttttgttgctacatcttcacgtaaaacgtttgatacgtcgattgcatggctggtaggttctacattcgttgtatctaaagtatttaattgctctactagctcaataattttaccaagctgaccagcgaaagcagttgcttctgtttctgatacttctagtttggcaagatttgctactttttctactgtttcttttgatatatttgacaaaatgccatcctcctttttaatggtacttactacgcggtagtgcttccctcctgttaaaaatgggaagaactgtcctctcctgcataattatacaacaggaaagaacaattcgcattgttttttattaatcgtaaatgtgagcagttgctgcatcttcatttgcttttcttgtaatcaatgcagctgggccatcggatgtagaaatattgacttgtaaatcagctgtcttcggaatatgttgtccgactaaatccgtcacatactgtgtaaagccgataatctctgcttcaccataaaattgtaatggaatatcaatgtttaattctgctagttgaccgtcttcatatctaccacgaccaacgacacctgtaaagtttggataatagtcttcaattgcttttttgaaattcaagaaattgtcattatctgttttgtgatctttagcagattcagttgatggtaaaacataatttttttcatctatatctttccaattagaaagactgtcaccatttgcagttgcataagcaatgtaattcccaggagctaccgcatcacgagcgccttgtttgtatatagcaatcgttacaggaacattttctaaaccttttgtttggcgaattcgatttaacacagtggcagacatttctttcccttgtgctaataattcactatcactaattggttgttcataagtgtctccatatttttctttttggtaataatcgaccgaattcattgcaagggcaatagaaattccaccaagagcaaccgtatctttatccgtttgttttaaataatcttgttctaaaatatgtgctagatagattggtttacgattctcaccgttaccattactggctgggtttaaaccattcggatttttatcactttttctatctaaccatttttctaaagtttctttatccaagtattgcccttcttgaaaaagataattatctggtgagtatttattttgtgaaacacgcattaaaccagattctaattcgttaatatcatatcgtgaataaatattcgatacgacaagtccacgggatttacttgctttgtatggtagtacggttttgtaataattggatgagatttggttttttgtcatgatgcccgtttccgcttttgaatcatctttttgtaccactttatcgtttgagtcaagttttggggcacagccagaaagcacaagcgttaagccgagcgctgctattatgagttttttcattcgtttaatccaccttcgtctggtaagtactctattaagtcttcttctgaccaaataggaatggctagttcttcagctttggctagtttagaaccagcatcactgccagctacaacaacatctgttttcttactgacgctcccagaaacattccctccgagggattcgattagtgcttttgcatcatttcgtgttaacttctctagtttcccagttaagacaacggttttacctgcgaaaacaagttcttcctcggacatatcttctagttttggccctgtataggtcatattgacgccagccctttttagttcttctaataaatcatgtacttcttcattcgcaaaataggtcacaatactgtctgccattttttcaccaatgtcgttaatactcgtcagtgtttctttgtccgcaacttttaaattatccattgtttcgaaatgaacggcaagtgatttggcagctttagcaccaacatggcgaattcctaagccaaaaagtagtttttcaagcgagttttgtttacttgcttcgatggatgccagtaaattagttactgatttctcacccattctttctaattctaacagtttctccttcgaaaggaaaaacaaatctgctacatctttaattaaatgctgtgaaaacaactgaataattactttttcgccaagtccgtcaatattcatcgcattcctggaaacaaagtggataagaccttcttttatttgagctgggcacttaggattaatgcatcttagcgccacttcttcttccaaacgaaccagttcactgtcgcatgtcggacatttttttggcatatggaaaggttcttcacttccgctacgttcttcggtgatgcttttaataacttctggaatgatatcgccagcttttttgattaaaacagtgtcgccaatgcggatatctttttccgtaattaaatcttcattatgaagggaagcacggctaacggttgtccctgccactctcactggttctaacacggcggtgggagttattacacctgttctacctacatttaattcaatgtcgagtaacttagttggtacttcttcggctggaaatttataagcaatcgaccaacgaggtgatttaacggtggttcccatttggcgttgttgttctaagttgtttaattttagaacaatgccatcaatatcatatgctaagtcggcgcgtttttctgtccattcgtcaatgtaagcatatacttcttctaaactactgcaaagccggcgctctttattgactttaagaccaagtgtttcaagcatatctaaaccggcgctatgtgtttcaacgcccatttcaccgaaatcagctactgcatacaggaagatatcgagatttcttgacgctgcaatttttgtgtctaattgtcgaagtgatccagccgcagcatttcgcggattagcaaataacatctggccttcttcttcgcgaatttcatttagtttttggaaagagcgtttcggcatgaaagcttcaccacgaacttcaatggaataatccttttgaagtttcatcggaatggaacgaatcgtgcgcaagttagcggtaatgtcttctccaatggttccatcaccgcgggtagcaccttgtttgtatttaccattttcgtattgaagggatactgctagtccgtcaattttaagttcgcacatataagcaatatcatcgcccactttgtcgcgaattcggcggtcaaaatccgccaaatcttcatggttaaaagcgttggcaagacttaacattggggtgtcatgtgctacttttttgaaaccttctaaaacttctccgccaactcgtttcgacggtgactcaggtgtaacccactcgggatgcgcttcttctattttaagtaattcttgcatcttctgatcatattcggcatcttctactgttggattatcaattacataataatcatagctgtattgatcaagtatgttgattagttcttcatacctttttttatcagccatcattcttcacctgctttttccaaatttatactttttcaattggcgcaaattctgcgagcaatcgtttgacgccagttgggctcgggaatgcaatatctagttccattccgctaccttcccctttgacactgacgactgttcctacgccccattttttatgactagccttgtcgccgactgtccaaccaagtgtttctgcgcctgaagatttgtaggcggttgttgttttttgtggaatacgaggtttagcatatggtttatcagcttttagtttgttttcattacctaattccagtaaatctcgagggatttctccaataaaacgagattcctgattagatgatgggcgtccataaagcatccgtgagtaagcgctcgttaggaaaagttcttcttccgctcgagtgataccaacgtaagcaagacgacgctcctcttccatttcatcttcctcataaatcgctctggaatgtgggaaaatcccttcttccatcccaactaaaaagacaactggaaattctagtcctttggcagagtgaagtgtcatcaatgtgacagccccattttgttcttcattgtcttcttctaacttatcgacgtcagcaacgagtgctaaatcagttaaaaaggcaattaacgttttatcgtcattttccttttcaaagttttgtgttacagataaaaactcgtcgatattttctaaacgtgtctgcgcttcaattgtccgttcgttttttagcattgctcggtaacctgttttttcaaggatttcttctacgagttcggttacggataaaaaatcttgcatttgcgtaaaaccacgaatcaaatcatggaaagcaactaaatctttgcttattttaggcgaaattcccgctaattcgatgcggttaagcacttcgaacagactgagatcataggttgttgcaacattgtttagtttgtctaatgtgcctggtccaacaccacgttttggaacattaacaatacgggtcaaactaatatcatcttcattattgctaataagacgtaaatacgccaaaatgtctttaatttcttttctgtcatagaactttgtaccgccgaccatcgtgtacgccatattcgacttcatgaaatattcttccattacacgggactgtgcattagttctataaagaatcgcaaagtcagaaagtggtcgattcgagttatttacttcttcttgaattttcataactacataggccgcttcttctttttccgttaatgctttatgataaaaaatcttcttcccttctgcattacttgtccaaagattttttggtttacggttaccattgttttcaatcacacggttcgccgcttctaaaatacgtttggttgaacgataattttcttctagcaaaatggttttcgcatttgggtaatctttttcgaaggacatgatgttactaatgtccgccccgcgccaaccataaatagattgatccgagtcacctacgacgcataagtttttgaaacgagaagcaagctgtttcacaagtaaatactgcgcgtggttggtatcttggtactcatccacgtgaatatactggaatttacgctgataatattctaaaacatctggcacacgttcaaataattgaatggtgaccataattaaatcatcaaaatcgagtgcttgatttttcttaagtttcttctcgtatttctcgtagacttcgccgaccattttgtcataaaaaccacttgcttctttaatatattcgcttgctgttatcagttcattttttgcattacttatagaagccaaaataccccttggctcaaacttcttgggatcgacattcttttctttcaaaatacctttaataaccgataattggtcactgccatctaaaatagtaaaattacgttcatagccaatgcggtcaatatcacggcgtaaaattcgtacgcacatcgagtgaaaagtagatatccaaatagattctgcttctccgcccattaaattgccaatccgcgacttcatttcgcgagctgctttattcgtaaacgtaatcgctaaaatgttatacggatttacgccacgttctctcactaaataagctatccgatgggtcaaaactcgagttttaccacttccggcaccagccataatcaataaaggtccttctgtactttctactgctcttcgttgttccggattcaatccgtccactaattcttttgcattcaattgcattctcctatacaccaccatacaaacatttgttcttattttatcatactacactttataatcaaaccgttttcttcctaaaaatagtcgcggtttctagtgctttttctaaatcttcataaataatattgcctacgataatcgtatccgcatattttgccatttcagcggcttgttcttttgaacgtatcccgcccccataccaaaattttgtgttacttaaagcggcacttgcttttcttacaacctctggatctccgtacatgccactatattcgacataaaaaatgggcagatgaaatatattctctgctaaccgcgcataggcaacgatgtcttcgtccgttaaatcggtcttcgcttctgttaaatgagccacttttgcatctttatttaaaataacgtaaccttctgatgtaactcgcttccaaggaataaattctcccatttctttgattaactccttgtgtaaaccatgcgtccacttactattttccgtattcaacacaactggaattaaaaaatggtctgcctcaggtaaaatcatggattcattgcttatttcaaggaaaattggcaagtccgtttcgactaataattcatacagattttggactgcttcgatttgcacattatctgtcccaccaataataaatccatcggttccagaatggatgagcttcgtgacatcattagtaggtaaattctttgctggatctaacttgaataaatgcttcatttgctcctccaagtctctataatgggatatcttattatagcattagttacatttcatcgcacccttacaataggaaattttaactttttttaagctttttttgttagttgttattgggatagcttttattttatggtatgatgaggaaaatttgattttattaagacttctgagtatttacatagaaaaaggaaatggggatattatgcaagaaaacagagaagaatggggctcaaaagtcggatttatattagcatccgctgggtccgcaataggaattggtgcaatttggaaactgccttatgtggctgcaactgcaggaggtggcgcatttttcttattgtttttagttttaactttgctcgttgttatgccgcttttaattgcagaatttgtgattggacgaggttctggcggtgatgccgttcaagcttataaaacactcgctcccggaacaaaatggagtttactaggaaaattaggcgtagtcggcgcaagtattttattttccttttatagcgtagttggtggttggattatcacttacttaattaaaacgctcgctggtgggattgccggagaaaatcaagctagtttgctgcatgatttccaagtgacgacagctaatccatggatatcagttggtgcgacgattctctttattttactaaatgtcattgttattagccgcggagttgttagcgggattgaaaaaatgagtaagtttatgatgccggccttatttattttatttattgttttaatcatccggtctttgacgctacctggtgcaatggaaggtgtcgcatttttcttacgacccgattttagtcactttacagcacaaacggttcttattacgcttggtcaggccttcttttcactcagtgtggggatttcggtaatggtgacttatagttcttatttaaatcgttcgacaagtttaccgcagtctgccatttcggtttcgcttatgaatgtatttgtgtcgcttcttgcgggattggccattttcccggcagcattttcgtttaatattacgccagatgcggggcctgggttgttattcgttattttaccttcaatttttaatcaaatgccctttgggatgttattctttattattttcttgattttattcttatttgcggcattaacctctagtttctcgatgcttgaagcgacggttgcgccactgatgaatgcgggtgttaatcgtaaaaaagcaagtctttggatgggactcgtgattgttttgatggctattccaagtgcgcttagttttggcgtttggagcgatgtccagatttttggactaagtatttttgatgctgccgattatcttgtgtcgaatattatcttgccagttggtgcattatttatcgcgattttcgttgggtatcgattacctcgtgaacttcttttaaaagaatttaccacaagcagtcattttggtaaaaaagtgtttattgtttggctttttcttattaaatatattgcgcccatcgcgattattttggtctttctttcagcaactggtttaatcgattttctgttttaacaaaaaaagcaatccgctaattttttagcgagattgcttttcttatattgccataaggacaatgcttgttacacaaatcaagattccactaaggccaatcgccgtaccaattgctcgtttttctctaacgttagcaagtgtcgtgaaaataaaacaaataataaagacccagtgccacagtaaagaaaaatcaagtccggtgccagtggaaatcatattaatcacaaaataaataactgcaagagcaagaatagagatgataacaatctgataggttttactattaaactttttcaacttaacccctaccaatcttattctggcttcgtcattcttgaaaatacaacatcatacatatcattgccataatgaagcgagcgttttacacgtgaaatggttgctgtacttgccccagtttctgattcaatcacattgtatgtttttccatcatgaagcatttttgctacttggaaacgttgagccatggactgtatttcattcactgtacaaacatcatcaaaaaaagcataacattcttctaaattctcgagggttaaaatcccttggaagaattcatccaatccttgtccacgcaacttctctatttgcatatctttacctccaaataatctcatatatcctactttcatattttaacgtaccaacgcgtaaaacacaaacgtttctcttcactaaatgaacaaaaaagtaccatctaggaatttctcccttagatagtacttttttattattctgctttcgtgccaatatcgattcgataaaaaaagttaggattgtccagtttttgcatttctgggtaaagtaaagtgcgtgcgtcactcatcgtttctgcttcttttgctagtagcaagacgcgtccaccatcagaaataaaatcgccattttcatcttgttttgtacccgcatgataaatcgctacatcttctgcaatatcatttagaccggttaatttatttcctttttcataatgctctgggtaaccggcgcttgctaggacaacacctagtgtaagtcccgttttcttaaatcgaacatctggtttttcgttatggagtaaagcatctataagcgctgcaaaatcactttctaaacgtggcaaaacgacttgtgtttccggatcaccaaatcgtgcattaaactcaattactttaggaccatctgcagttaggataagccctgcatatagaattccacggaaataacgaccttcttttaccattccttttgcagttggaagaagaattttttgaactgcttcttctatgacggcttcagaaatatgtggcacaggagaataggcgcccatcccgccagtattgggccctttatcgccttcataagcacgtttatggtcctgcgcaatagacattgggtaaacttcttccccgtttacaaaagccatcaaggaaaactcttctcctgctaagaagtcctcaataacgaccttaagagaggcgtcaccgaatttttcttctaacatcatatcttttaacgcaagaactgcttcttccatttctaacgctactgtgactccttttccagcagcgagtccatctgctttaatgacgattggcaccccgcgctcattcaaatatgctttcgcttccgcataatcggtgaaagttcttgacgctgccgttggaatagcatatttctccataaattgtttcgcgaaatctttactaccttcaattaaagctgcatttgcttttggaccaaatgctttaattccagcttcttccagagcatcaacaaccccttccaaaagaggtacttcaggtccgacaataacaaaagcaatttctgcttttttagcaaaatcaattaaaccagctttatccgtttcagaaattgctactaattgaatgtcatctaaacgcattccgtcgtttccgggagcgcagaatactttttcgacattgtttgatgctaataattttttactaatagcatgttctcgaccaccgctaccaactactaataagttcatttatttacacgtcctttttgaggattaatgtttgaagtgtcgtacatgagttagaaccatagaaataccatatttatctgccatcgcaattgattctttatctttgatagatccaccaggctgaataatcgctgtgattcctgatttcgccgcagcttcaaccgtatcatccattggaaaaaaggcatcggaagcaagtacggctcctttagctttctcacccgcttgctctagtgcaatcaaagcggagccgattcgattcatttgtccagcaccaattccaagcgtttgtttgtcagagccaaccacaatcgcgttggacttgacatgtttcacgattttccactgagcaagtaaagctttcatttctgagtcggttggttgtttttctgtcactacttcataactagttgtatcttctacaagagagtcgttcgcttggataagtagtccaccattaacagacgttttctcaaaaccttccatattacccgcaaacggaacagttagcaaacgaatatttttctttttcgctaaaatcgcaaaagcttcttcggaaaaacttggtgcaatgacaatttctaagaaaattttactcatatgttctgctgttttcgcgtccacttctttatttaaggcaacaatcccgccaaaaatagacgtttcatccgcttcataggctttcaaataagcttcttcaatattttcgccaacaccaacgccgcatggattcatatgttttactgcaactgcaactggctccgtaaattcactagcaattttaagggctgcatctgcatcgcgaatgttgttataagataactctttaccgtgcaactgtttagctgcactaattgagttttctatcgtacctggttctgtataaaaggctgcatcttggtgaggattttcaccgtagcgcaagacttgttttcgattataagtgaacgtcactttttctgggaatgtttctccagtgatgttcgttaagtactctgcaattaaagcatcataggccgctgtgtgtcgaaatactttcgcagctagacgttggcgagtttcaaaagtagttgcaccgtgttcttgtagttctgtgagtactgcatcataatcagctgtatcaaccactaccgttactgctgcataatttttcgcagctgatcgtaacatcgaaggtccgccaatatcaatattttcaattgcttcttctaaagtaacaccaggtttttgaatcgtttcttggaaaggatataaattaacgatgactaaatcaattggcttgatattatgtgccgcaatagcttccatatgttcggctgtatcgcgtcttgccagtaacccaccatgaattgctggatgaagtgtctttacgcgtccatcaagcatttcgggaaattcagttacttcttctattcctgttactggtacgccagcttgttcaaatgccgcttttgttccacctgtcgaaataatttctactccaagttctactaatttttctgcaaatggcacgatgccgtttttatctgacacactaataagcgctcttttcatgataattaatcgttccctccattttgaattaatcctcgaatcacttttggataaaaaatatgttctacttgatgaattttttcagctaaagtatctgtggtttctgctgtttcaatcgtaactttcacttggtcaatgattggccctgtatccattccggcatctacaaaatgcgcggtgaccccagttcctgaaacattcgcttgaatcgcttgaccaatcgcatcttttcctttgaattcaggtaaaagagacggatgcaagttgacaatttgctcaggaaattctgctaataaagttggtccaatcaaacgcatatatcccgctagcaccaacaaatcaatttccaatctgcgaagttctagcaaaatttctgtttcaaaagcttctttatccggataatttttcgcttcaaaaagaaaaactggaatatcgtgcttgtttgcccgctctaaaacataagcatttggtttatcacataccagtaatttcacataaggcttaataaattcgtcatccactaacgcttgaaaattcgaaccgctaccagaagcaaaaatggctatattcatccttttttgcctcctgcgaaaataaccgcgttgctttcacgtgtcgtaacttcgccaataacgtaagccgcttcaccgttttgaacaagaacttccaaggttttttccacatccgattttgccactgccaacaccataccaatgcccatattgaaaatttcatacatttccatttcgtttaattggccgtatttcttcacaacatcaaaaatcggcaacatcggccatgaacctaattccactttcacagctaaatcattcgttaacattcgtggtaaattttctacaaatcctccacccgtcacatgcgtaatcccgtgtacagttacctctttcaatacttctaacactggtttgacataaatacgtgttggtttaagtagctcttccacaagtggcacatctagttcactgatttccgcatcgagcgtaaattcgttatctttaaagaaaattttccgaacgagtgaataaccattactatgaatcccactagatggaattccaattaacgtatctcctgcttggacagcgccttctgtaattagtttttgtttctctacagcgccaactgtaaaaccagctaaatcataatcatccgcgccatacatatctggcatttccgctgtttcgccaccaattaacgctgctcccgcttgttcacagccgtcagctacacctttaacaatttgttccattttaacaggatctgtcttccctgttgcaatataatctaagaaaaataagggctcggcaccttgagctaaaatgtcattcacgcacattgccacgcagtcaatcccgatagtatcatgcttatctgcttcaatagccaaaagtaattttgtcccaacaccatctgtaccagaaacaaggacaggctcttttaaattcaagctacttaaatcaaacattccaccaaaagaaccaagtgcccccatcgcgcctattcgttctgttctagccacatgttttttgatgcgttccactacttgatagccagcttctacgtccacgcctgctttactatatgcattttctgccattcgatttgtcactcctcattatttttctgcttctaagctcgctaaatattccgcttcataatcgtataaaggggttgggtaatcgccgttgaaataagccatacaaagtcccccgtatggttcgttcggataaggtctaccaatggaatctactaaaccctcttcactcaaatactctaaagaatcagccccaataatccgacaaatttcatcgacagaataattagatgcgattaattcatttcgcgtttgaatatcaataccgtaaaaacaagggtaagcaagtggcggtgaagctattctcacatgaacttccgctgctcccgcttcccgcaaaagttgcacaatacgtttactcgtcgtcccgcgcacaatcgaatcatcaatcatgacaacacgtttcccttccacaaccccacgcaccgccgaaagcttcattctaaccccttgctctctgagttcttgcgatggttggataaaggttcttgccacatatctatttttgatgaggccaagctcgtatggaagtccagcctcttccgcataaccaatcgccgcagaaatactcgaatctggcacacctgtaacaacatcggcatcaataaatgcttctttcgctagccttttcccagaacgttttctagctgagtggacattaatcccagcgatattagagtctggtcgagcaaaataaatatactccatactacaaatcgaatgcttcacattttccgtaaatttttcaatccgaagtccgtcatcattaataataattagttcgcctggctccacgtctcgaacaaattcagcgccaaccgtttcaaaagcacatgtttctgaagcaactacgtaagaatcaccaatgcgaccaatcgaaagcggtctaaaaccattcggatcaagtgcagcatacatcgtatcttccgtcagaagcatgtacgcaaagccacccttaaccttgttcaaagccacttttaaatcttccacaaaatcccctgtatggctacgtttaattaaatgcgctaacacttctgtatccgaactcgtttgaaaaatagcgccttcttcttctagttcacggcgtaaacttttcgcattaaccaaattcccgttatgcgcaagtgctaaagaagaactatgaaagtgaaataaaaatggttgtacgttccctaagtttttttgaccagctgtcgcgtatcgaacatggccaatggctgctttaccttttaaatcatctagttcaccatgtttaaatacgtctgctaaaaggccgagatttcggtgaccttttagtatttcgccgtctgtcgaaacaattccggcaccttcttgaccgcgatgttgtaaactatgcaacccataataggtgatttccgctgcattaggatgatcccaaataccaaaaataccacattcttcgttaagtccttttacttcagcaagcatggaatagccccttcccaaatggatcgtaattccgttgttttcgctgtaacttgatcttccttatgtttcacacgaatcgtatcatcctcggttactacaccaaggcggtatactttttccagttccattaattgcgcaaaagctgcttcgttttccggttttaccgatactaagaaacgtgattgcgattcactgaatagttgattcaacgcaaacggtacttctacttccgcaccaagccctgctttaaaagtcgcttccgcaagggcaacaccaaatccgccttctgccaaatcatgactagaagcaactagaccttcctgaatcgccgttagaagtaattgttggtattttttctctgtcactaaatctaattccggcgcacgtccgctaattttcccttgttgtaatttctgcaattccgaaccactatattcagcttttgtttcaccaattaagaaaatcacatcgccactatttttaaaatcttgcgtcgtaatatgtgccaaatcttctactaaaccaaccattccgataactggcgttggataaattccggtaccatctgtttcattataaagcgatacattccctgagataactggcgtatcaagttctaaacaagctgcactaataccgtcagccgctttttcaatttcccaaaaaatttctggtttttcaggattaccaaaattcagtccatctgtaatcgctagtggtttcccgccagaacaaacgatattgcgcgccgcttccgcaaccgctatcgctccgcctacttctggatcaagatacaaatagcgtgagttacaatctgtcgtcattgcaattgccttctctgttccacgcacacgaacaatcgccgcatctgaaccaggtacaacagctgtatccgtccgaacttggtaatcatattgctcataaatatggcgcttactagcaatcgttggctgagcaagcagttctttccaaactcccaccacatcatccatagctggcacaaacgcttcctcttcttggaatgcttgataacgagttggttcttttgaaggcttatgataaactggcgcgtcttccgcaagtgcatcaacaggcacattggcaactacttcaccatgatgaataattttgtacattttatcatccgttacttgaccaatcacaacagcctctaaaccataacgttcaaataacgcttggatttcttccacatgcccttttttcacacatagaagcatccgttcttgcgattcagaaagcaacatttcatatggcgtcatgtgtagttcccgttgcggcacatcatccataattaattctagcccagcgcccgcttttgaagccatttcagaacttgagctaacgagtccagcagctcccatatcttgaattcccactaaaatatccgaatgatcacgaatcacatctaaacaagcttcaagcaacaatttctccataaaaggatcgcccacttgtacagcagaacgttgttgctcgccttcttcactaaactctacagaagcaaaagtagcaccgtgaataccgtcacgaccagttttagcaccaacatacatcaccgggttgccaattccttttgcttgccctttttgaatgtctttcgcttcaattaagcctacacacattgcattaactaatggatttttcgtataacaaggatcaaattggatttcgccaccaaccgttggaatcccaatggagttaccgtatcctgcgattcccgccacgacttcactaactaagtatttcgcatgaggtgtatctaattcgccgaaacgaagcgagttaagcattgcaatcggtctagctcccatcgaaaacacatcacggataatcccaccgaccccagttgcagcaccttgatacggctccacgtaggatggatgattatgactctccactttaaaagcaacacctagaccatcgccaatatcaacaatcccagcaccttcacccggtccttgcaaaacttgttttccttctgtaggaaatttccgaagtactggtttagaatttttatagctacaatgttcggaccacataacggagaaaagtccagtttctgtataattaggctcgcgtccaagaatcgaacaaacaagctcatattcactatcagttaagcccatttcttgataaatcttttgttctttaatttcttttgtcgttggctccatgttaggcatttacttgttcctccttccaagcttttacaacggactcgaaaagtcttaaaccatcagtaccgccaataatttcttctaccgcgcgttctggatgtggcatcattccaagcacattaccgcgctcatttacgatacccgcaatatccgcacgactaccattcggattaacgctatcatatgtaaaaacaatttggttattttcttttagttttaaaagtgtttcgtcgtcacagtaataattaccttctccgtgagcaacgggaacttggataatttcgccttcttcataaagctccgtaaacatcgtacttgcatttgccacacgaagcggcactgttttacaaataaaatgcaaattattatttctaattaaagcacctggcagcaaaccaatttccgttagaatttgaaatccgttacacacaccaagcactggttttcccatttcagcaaagcgcaaaacttctggcataatacttgaaaattttgcaatcgcaccagttcgcaagtagtctccgtaagaaaatccacctggaagtaataccgcgtcaaagcctgcaagacttgtttccgcatgccatatatattccgcctcctcgccaagagaatcgcgaatcgcatgtagcatatcaagatcacaattagaacctgggaactgaatgacagcaaatttcatcgtttaagcctcctcaatttcatatcggtaatcttccatcaccggatttgttagcagtttgtcacacatttcatttaacacttcatgaatatctctatccgacttcgctactttaagttccataaatttaccaatacgaacatcttctacttcctcgtaacccatgcttttcgctgcatcttttactgcaaccccttgcggatctaatacgcttttctttaaagtgacataaactttgacattatacattttgtggcctcctagttttgaacttgctttaatctattcaatacttctgtatacacatctgttaaattgccaatattccgacgaaagacatccttatcgagcttttgatttgtttccttgtcccaaagtctacatgtatcaggcgaaatctcatctgctagcaaaatttctccagccgcgtcccgaccaaattctaatttaaaatcgatcagcgtaatattcatttgattgaataattcttgtagcaccttattaatcgaacgagccgcctgacgaatcgtatccatctcactcgttgtcgcaacctctaaataaagcacatggtcatcattaataaacgggtcatctagcgcatcatctttatagtaaaattctactatcgcattcggaatttgctcgccttcttcttttccaagccgtttcgcaagactcccagccatcacattacgaacaaccacttcaagtggaataattgatacctctttcaccaattgttccgtttccgaaatcgcccgaataaaatgactctctattcccgcttccgccaaatgagaaaaaataagcgatgtaatttggttattaagctcacccttcccagcaaaagattcctttcgtactccatttagcgctgtcgcatcgtccttataagcaacacgcaagacacctgcttcttctgttttaaaaagtcgttttgcctttccttcataaaccagttcattagtcacaataatttatctccttataaattacttaacctctttgaaaaaataaatatcaaagaggttaggttgtattctgcccgtaattataatcctaaacgatcaaaaattaagtcgacattcttcaggtgatagttgtaatcaaagcaatctgcaatttcttccgcagataggttttcagtaatggttgcatcttgttctactaattcacggaaaggtacttgtttttcccaagcttccattgctcttggttgtacgacatcataagccgcctcacgagccaaacctttatcaatgagcgcaagtaacacacgctgtgaataaataagtccaagtgttctgtccatattgcgtttcatattttctgggaacaccgtcaagtttttcacgatatttccaaaacgattcaaaatataatctaataaaatagtagaatctggtaaaataattcgttccgctgaactatgagaaatatcacgttcatgccaaagtggtacattttcataagcagtaaccatatgaccgcgaataacgcgcgctagtccagtaacattttcagaaccaattggattacgtttatgtggcattgcggacgaacctttttgtccttttgcaaagaattcttccacttcgcgcacttcgcttttttgtaacgcacgtacttctaccgcaaatttttctacagaagttgcaattaatgcaagtgttgccaaatattcagcatgtcgatcacgttgcaatgtttgcgtagaaataggtgcaggtgtcgttcctaatttttcacatacgtaagtttctacaaaaggatcaatatttgcatacgtcccaaccgccccagagatctttccgaattccacaccatcagccgcaaaattaaaacgttctaagttacgtttcatttcctcgtaccatagagcaagcttcaacccaaaagtagtaggttccgcgtgaacaccatgtgtacgtcccatagttacagtatatttatgttcttttgctttttcgccaataatcgcaatgaaattttccaaatccttgcgcaaaatctcattcgcttgtttaagtaaataagaattcgctgtatccactacgtctgttgatgttaagccataatgaacccatttacgttccgcaccaagcgactcagaaaccgaacgagtaaatgccacaacatcatgtctagtttctagctcaatctcatgaatacgatctacatcaaacttcgcattagcacgaatcttcgcaacgtcttctttcggaatatcaccaagctctgcccaagcttcacaagccaaaatctccacttctagccaagcctgataacgattttgttctgtccaaatgttgcccatttctttacgagtataacgttctaacattcttttaaattcctccagttacttccaaatttgcgtttcttctaaatcttgtataaccgcttttggttcatcagcaagcacagtaacatgacccattttgcgattgattttcgcttctttttttccataataatgtacaaaccaatgtggataattcaccatttgtttattcacagcatcaacatgttgccctaaaatattaatcattacggcgggttttaaaagttctggttttacgagtggtaatccaacaatcgctcgaatatgctgcgtaaactgagaaatcgaacaagcttcaattgtaaaatgtccggagttatgcggtcttggggcaagttcatttacataaatagcgcctgattttgtcacaaacatttctactgctaaaacaccacataattgaagtacttctgctaactttctcgcaatttcttccgcttcctcgtaaacgtcagccgccacatctgctggaaccatagtcgtatgcaaaatattatttacatgtacattttctgcaactggaaaagtttctatttgcccatctaaattacgagcgacaaccacagaaatctctttttcaaaaggaatccaagcttctagtacacaagagccgtaacgcaataatctcgctgctgtttcgatatccctcgcatcatgaataaccacttggcctttcccgtcgtatccaccttgtgccgtttttaaaacagcaggatatccaatacttttaatttcattttcgatttcatcttgttccactataaccgcatatggtgcaatgttaatattagctgattccagataagctttttccaaaatcctatcctgtgtaatcgaaagcaattccgatccttgtgggacagatactaagttttgcgtcattttcaaagcatcatagtcgatattttcaaattcatatgtaactacatctgctttttcggaaagttcgcgtaaggctactttatcatcatagtcagcaataatttgctcatcacttacttgagcagctggacaatcagcggtaggatcgagaacaataatacgataccccatcgctttcgccgcaagagctagcatacgaccaagttgtccgccaccaatgataccaatagtactatttgtcagtaaaaattttttatccaagataatcactactttctagaactgtttcttctagtgtagcacgtcttttttgtaatctgttagtaattgcatcgtctgttatggataaaatttgtgcggctagaagtccagcatttacagcaccactttctccaatagcaactgtcgctaccggaacacctccaggcatctgcacaatagaaagtaatgaatccattccattcaacgcttttgatttaattggcacaccaataacaggcaaagtcgtctttgccgcaaccatacctggcaaatgcgccgcgcccccagcaccagcaataataattttcaaaccacgttcccgcgcttgttctgcatattgaaacattaaatctggtgtacgatgagcagaaaccacttttttctcataagctatttctaattcatctaatacatcacatgcttttttcattgtatcccaatctgaggtactccccataatgacaccaattacagcaggcattacgtgatcaactccttaataatctcttttcgactccttcattctaacaataggtacgataaatgtcaacgaaaaatcgaacatttaattgttacattttattaacgttcgtgtttagggcgtatttgttctttttactagcattatgtatccattttcactaaataaataaaaaaagaagctaccatcataggtaagcttctcttcatttccgaacttgtttaacccaaaaaccaccgtgaatttgttttggctcagaggaaacaatgaatgcaccattatcaatttcaataatgtgtttatataatttccgctcattctttctttgggtcaaaatttcaagcatcatccgttcaccatcacgaccacttgcaagccaactagtaaccccatatcctagatctcgaatttgatttggtaagtctaaattatattctttcgtaataacattcactgtaatataacctaaagcaattcgctcttcaattttcataccgacgataattcccacgccaaacccaacagcatacgctaaaacattggcaatattatttaaattatccaaaaccaaactaagggcaactacatagataatcatttcaaacacacttgaaagtgcagctaagtaacgataacctttcatcgttaaaagtaacctcaccgtataaatcgtcacatacaaaatatttacaataaaaatagtaaccactataaatataccgttatccactaaaataacccctccacctaaaaactacattccacagagtcttttactaatataacatccatttagatagctgacaaaagaaacacttcaacaaaaaagccctaaataattaggacttttcaaattgcccggcagcgacctactctcgcagggggaagcccccaactaccattggcgcagagaagcttaactaccgtgttcgggatgggaacgggtgtgaccttctcgccataactaccagacaatattgaagttgttgaaagattgctctctcaaaactagagaagaaagtgttcagttaggtaacttcgtttcattttttggttaagtcctcgatcgattagtatttgtccgctccatgtatcgctacacttccactccaaacctatctacctgatcatctttcagggatcttactttccgaagaaatgggaaatctcatcttgaggggggcttcacgcttagatgctttcagcgtttatccctgccacacatagctacccagcgatgctcctggcggaacaactggtacaccagcggtgtgtccatcccggtcctctcgtactaaggacagctcctctcaaatttcctgcgcccgcgacggatagggaccgaactgtctcacgacgttctgaacccagctcgcgtgccgctttaatgggcgaacagcccaacccttgggaccgactacagccccaggatgcgacgagccgacatcgaggtgccaaacctccccgtcgatgtggactcttgggggagataagcctgttatccccggggtagcttttatccgttgagcgatggcccttccatgcggaaccaccggatcactaagcccgactttcgtccctgctcgacttgtcagtctcgcagtcaagctcccttgtgcctttacactctgcgaatgatttccatccattctgagggaacctttgggcgcctccgttactctttaggaggcgaccgccccagtcaaactgcccacctgacactgtctccccacgcgctaagcgtggcgggttagaatggtcatacagccagggtagtatcccaccattgcctcctcgtatgctagcgcacacgtctcttcggctcctacctatcctgtacaagcggtacaaacattccatatcaggttgcagtaaagctccacggggtctttccgtcctgtcgcgggtaacctgcatcttcacaggtactataatttcaccgagtctctcgttgagacagtgcccagatcgttgcgcctttcgtgcgggtcggaacttacccgacaaggaatttcgctaccttaggaccgttatagttacggccgccgtttactggggcttcaattcgtaccttcgccgaagctaagcactcctcttaaccttccagcaccgggcaggcgtcagcccctatacgtcaccttacggttttgcagagacctgtgtttttgctaaacagtcgcctgggcctattcactgcggctctctcgggcttgcaccctaatagagcaccccttctcccgaagttacggggtcattttgccgagttccttaacgagagttctctcgctcaccttaggattctctcctcatctacctgtgtcggtttgcggtacgggcagtactactcttcctagaggcttttcttgacagcgtgaaatcaggaacttccgtacttaatttccttccccatcacagctcatgcttcgcgagaagcggatttgcctacttctcacactcactgcttggacgcacatttccattcgtgcgattccctatccttctgtgtcaccccatcggttaaacaattagcactggtacaggaatctctacctgttgtccatcgcctacgcctatcggcctcggcttaggtcccgactaaccctgagcggacgagccttcctcaggaaaccttagatattcggtggaagggattctcacccttctttcgctactcataccggcattctcacttctaagcgctccaccagtccttccggtctgacttcaccgcccttagaacgctctcctaccacgaacctctaaagaggttcatccacagtttcggtaatatgtttagccccggtacattttcggcgcggggtcactcgaccagtgagctattacgcactctttcaatggtggctgcttctaagccaacatcctggttgtctaagcaaccccacatccttttccacttaacatatatttggggaccttaactggtggtctgggctgtttccctttcgactacggatcttatcactcgcagtctgactcccgagtataagtacatggcattcggagtttatctgaattcggtaacccgagaagggcccctagtccaaacagtgctctacctccatgactctttacctcgaggctagccctaaagctatttcggagagaaccagctatctccaagttcgattggaatttctccgctacccacacctcatccccgcacttttcaacgtgcgtgggttcggacctccagtaagtattaccttaccttcatcctggacatgggtagatcacctggtttcgggtctacgacctgttacttatgcgccctattcagactcgctttcgctacggctccgctttttccgcttaaccttgcaacaaatcgtaactcgccggttcattctacaaaaggcacgctatcacccattaacgggctctaactacttgtaggcacacggtttcaggaactgtttcactccccttccggggtgcttttcacctttccctcacggtactggttcactatcggtcactagggagtatttagccttgggagatggtcctcccggattccgacggaatttcacgtgttccgccgtactcaggatccactctggagggaaagccatttcaactaccgggctgttaccgtctttggcgggcctttccagaccgcttcatttataactttcttttgtaactccgtatagagtgtcctacaaccccaagaagcaagcttcttggtttgggctctttccgtttcgctcgccgctactcaggaaatcgatttttctttctcttcctccaggtacttagatgtttcagttccctgggtctgccttcctcacgctatgtattcacgtaaggatactatccgactaaagatagtgggttcccccattcggaaatctctggatcaacgcttacgtacagctccccaaagcatatcggtgttagtcccgtccttcttcggctcctagtgccaaggcatccaccgtgcgccctttctaacttaaccaatttacttctacgaagtaaaggttgtttttctgattttccgtatcagcgatgatacatccaatcagatgaaagattcactttcagatgattctcggttacttgtgtcataaataataaattatctatgctaactttactaactttcttatctagttttcaaagaacaaacatactgagaagtactaacctctcaaaactgaacaaatagagaagaacgaaaactcacaggtttccttttccttagaaaggaggtgatccagccgcaccttccgatacggctaccttgttacgacttcaccccaattatctgtcccaccttcggcggctggctccataaaggttaccctaccgacttcgggtgttacaaactctcgtggtgtgacgggcggtgtgtacaaggcccgggaacgtattcaccgtggcatgctgatccacgattactagcgattccggcttcatgtaggcgagttgcagcctacaatccgaactgagaatagttttatgggattagctccacctcgcggcttcgcgaccctttgtactatccattgtagcacgtgtgtagcccaggtcataaggggcatgatgatttgacgtcatccccaccttcctccggcttgcaccggcagtcactttagagtgcccaactaaatgctggcaactaaaatcaagggttgcgctcgttgcgggacttaacccaacatctcacgacacgagctgacgacaaccatgcaccacctgtcactttgtccccgaagggaaagctctgtctccagagtggtcaaaggatgtcaagacctggtaaggttcttcgcgttgcttcgaattaaaccacatgctccaccgcttgtgcgggcccccgtcaattcctttgagtttcaaccttgcggtcgtactccccaggcggagtgcttaatgcgttagctgcagcactaaggggcggaaaccccctaacacttagcactcatcgtttacggcgtggactaccagggtatctaatcctgtttgctccccacgctttcgcgcctcagcgtcagttacagaccagagagtcgccttcgccactggtgttcctccacatatctacgcatttcaccgctacacgtggaattccactctcctcttctgcactccagtcttccagtttccaatgaccctccccggttaagccgggggctttcacatcagacttaaaagaccgcctgcgcgcgctttacgcccaataaatccggacaacgcttgccacctacgtattaccgcggctgctggcacgtagttagccgtggctttctggttagataccgtcaagggacaagcagttactcttatccttgttcttctctaacaacagtactttacgatccgaaaaccttcttcatacacgcggcgttgctccgtcagactttcgtccattgcggaagattccctactgctgcctcccgtaggagtctgggccgtgtctcagtcccagtgtggccgatcaccctctcaggtcggctatgcatcgttgccttggtaggccattaccctaccaactagctaatgcaccgcgggcccatctgtaagcgatagccgaaaccatctttcaaaggcgtggcatgcgccacatcttatcattcggtattagccccggtttcccggagttatccccaacttacaggcaggttgcccacgtgttactcacccgtccgccactaacattggaagagcaagctcttcctccgttcgttcgacttgcatgtattaggcacgccgccagcgttcgtcctgagccaggatcaaactctctttaaaatataaattgaatttgaatacttattcaacaccgtgaataagattccttgcgtcaaattgacttcgctagcaattaaattactagtttgttttgttgaaaacagctttctgttttctgccctgcgattaccagtgagactttacgtctcattgcttttcgtcttcttctttgttcagttttcaaaggtcagttgctttgttaacgcaacttttaaatcttaccataaagtttaaatcacgtcaacaactatttttaaaatgttttttgatgaatcaatttgtatcaattcagctttatcattatataacagctttatactaaatacaagccttttaagttatatttttaattctttctctagtgcatgtataaaatcctgcataattatttgtttttctcctgcaagttcccgaccagtctttgtttttagttgcgtttgaattaagagtaatttatcgtaaaagtgttgtaaagtggtattttctgggtgatctcgattagcgatttctctattgtgtgctcctccataagtaaatgttcgagctataccgattgcaccaattgcatccaaacggtctgcatcttgaactattttttcttctattgtagaagcttggataggattttttccatttttaaaagaaactgcttggataattcggatgattttactgattacatcttcaggtatttctttttctctcagccaagttgtgattatttcagttgcttgtaatgggtcttctgttagtttgctatcattatagtcgtgaaacaatgctgctaattcgattgcaaatttgtccccaccttctgttacttggatttgtttacttaaatgccagactcgtttaatatgttcccagtcgtgtccagtagtttccttttcaaaatgggactgcatccatttttgcgcggcaattattatttcttcttgcttcattagtatttgctccttttttacgttattttcatgtacaatagtagaaaatggaaatgaggtattcgatgtttgcttttaagaacgtttatttaaagcgcgataataaaatgattttgtcggatattaattgggtggttaatgataaggaaaactgggcaatactcggacttaacggttctggaaaaacaactttgttgcaacttttaaatgggtatctttggcctagcagtggaaatcttcaagtacttgggcatatttttgggaagacctctttgccggagttacgtaaatcgattggttgggttagtaatgcgcttgaccatcagctgaaagagtatgagttaagcgagcaaattgtacttagtggaaaatttgcaagtattggtatttatgaaaaagtcactactgcggagattgaccaagcgaaaaagctgcttactgattgtggcggtatcacacttattggaaagccgtataaaattttatcgcaaggtgagcgtcaaattgttttaattgcacgtgctttaatggccagtcctaagttacttattttagatgagccttgtaacgggcttgatttatttgcaaagaatcgtttgttagaaagaattaagaaaattgcagaacttcctgaatcaccaacgatgctctttgttacgcatcatacggaagaaattcttccctgcttcgataatatcattttactgcgtgacggggaaataactcatcacggaaaaacagaaaaacttttaacagaggaagtccttcaagatttttatcaaaagccggtcgaattaattcggataaaagatggctccattgcagtctatccgaagtaagtggtatagttagaatacgaaaaatgcgtatgtagaggggcgaaaaattttgtatgaaacgatgattgcaaaagcaggtgtccgtgagcttctcgggatggatactagtctgatttatggttcatttgcttatgaaatggaagacgaatggatggatttaacagggctttggatttcgaatgagaatgcactgattttttacttagaaaatgaagatgtctatttactgaagaaattcgcttatgaaatgatagacagtttagaacaaaaagtgagtatcatttccatgacgaaaaaattgattttacatcttaataataaagaaagctatacattactagtagcaaacggtgaagctaaactatttgctgctagggtaaatgagcgcatagaaaaagtgagtctaggatgaactagactcacttttttattattctttttcttcaaacaaacgagccacttcaatgattacttctgttgctttaaccatactttctaatgcaacatattcaaatttaccgtggaagttctctcctccaccaaaaatattcggcgttggtagtcctttgtatgaaagttgagcaccatctgtcccgccgcgaattggactgattttcggttcaatgtctagatttctcatcgccgcactgacgatatccacaatttcttttactggttcgattttttcgcgcatattgtaatattgatcgttcagttttaattctaccgatccttcgccgtatttttcttctaactctttagcgatactagcaatatgtgtttttctttccacaaatttcaagtgatcgaagtcgcggataatatagtaggatctggcttgttctacgtcgccgtttagggagattaaatgataaaagccttcgtaaccttctgtgtactctggtgcttcgtcttttggaatacgcgcatcgaattccatcgccattttaacagcattaaccattttgtttttggctgtaccagggtgaacactattacctttaaaagtgattttggcagaagccgcgttaaaactttcatattcgagttcgccaagtgggccaccatccattgtataagcatattttgcgccaaatgcttctacatcaaaacgttctgggcctcggccgatttcttcatctggtgtaaaagcaatacgaatttttccgtgtttgatttcgggatggttaattaaatggttcattgccaccataatttcggtaatgccagctttgtcgtctgcgccaagtagcgttgttccgtcagttgtgattagtgttttccctttgtacccagctagttctggaaattgttttggtgaaagcactacatttaagtctttgtttagaatgatatctttaccatcataattttcgtgaacttgtggttggacgtttttacctgttaaatctgttgctgtatctaaatgggctaaaaatccgattactgggacttctttcgttgaattagatggaagtgttgccatgacataaccaaattcgtcaacagtgacttcttgcattccgatttcttttagttctgtaacgagaatgtttgccagttccatttgacctggggttgttggacaaactgtgctttcttcattcgattgagtatctacttttacatattttgtaaatcgttttaatagttcttctttcattccgaccactcccttaaattgattctttttcattataaacttgattttcgaaaaattctattcctgactgtcgagtagtgtttttaattgaagcgtcgttcgccaattccgcgttgtcgttagagccattttatattgaccaaggaaaactggtaattttaaggtgtggatttggttggagaaaacatggacataaaggacgcggccaattgcgattacttcggcttggtcgtttttttgtcttgggatatcaatattttcattataaaaagcagccatccagcgttcttcttcgccaattgtttctggcggaaatggattgtttgcgatgatttgcttataattttgttctgaaaatacgaatacatcaatagttagttcacatatcgctttgattactttcgttatcttcgccgctacttctgtttctgtttgtaaaatagaacttagtacgaggttcccactttggatataagttactacgttttggaatccctcttcttctaaagccccttttaagtttttcatgttcactttattttttccagcaacgtttaccgctcttagtaaagcgacgtaatttcccatctatttccctcccaatcgtttaactacattatagcatgtgaattacgttataataggactattagtgatgggaggttttttaggtgaaattaatttcttggaatgtaaacggacttcgagcagctgtaaaaaaaggctttttggagtattttgaagaagtagatgcagatatattctgtttgcaagagacgaaattacaagaaggacaaattgaactggatttacctgcatataaagattactggaattatgcggtgaaaaaaggttattcaggtactgcgatttttacaaaagtggagccgttatcggttcaatatggtttaggtattccagagcatgatacagaaggccgggttatcacacttgaatttgaggaattctttatggtaacggtttataccccgaattcgcaagcggagttgaaacgactagattaccgaatgacgtttgaggatgcgattttggaatatgtaaagaacctagataacacaaaacctgttgtcctttgtggtgatttgaatgttgcgcacgaagaaattgatttgaaaaatccgaagacaaatcgtaaaaatgctggcttctcagatgaggaacgcgcgaaattttctgcatttttagacgctggatttattgatagtttccgttatttttatccagatttgaccgatgcttattcttggtggtcttaccgaatgaacgcgcgtgctaggaatactggttggcggattgattattttgttgtatcggaacgtttgaaagataagttagtggatgcaaaaattcatgcggatgtgcttggttcggatcattgtccagttgagctagaacttaatttataacataaaaaatcctcactccaaagagtgaggatttttgaattatttagctaatgctttttttgctgaatcagcaagtgtgttgaatgatgcgatatcattaactgctaagtctgcaagcattttacggttaatatcaataccagctaattttaagccgtgcattaatttgctgtaagaaagatcttgcatacgagctgccgcattgatacgtgcgatccataatctacggaaatcacgtttcttttgacgacgatctctataagcatattggtaagatttcattaccgcttggttagctactttgaataataaatgtttagagccgtaataccctttggctaatttaactatctttttacgacgtttgcgtgttactgttccgccttttacgcgtggcatattgtctacctcctagaatttacaaaaatgttgtttctcttatttcattttagcgaccatttgacgaatacgtttgaagtcgccagctgataccattgctgatttacgcaatttacgtttttgtttttgggatttgttagcgaacatatggctagtgaagccgtgtctgcgttttaattttccagatcctgttctcttgaaacgtttagcggaaccgcggtgggttttcatttttggcatgaatttttcctcctcaaaactttacttttcatgaagtggtgctaggactaagaacatcgaacgtccgtccatttttggtctttgctcaattgtacaaaggtcttcgcacgcttttgcaaaacggtcaagcaccttctgaccgatttctttgtgtgtaatggcacggcctttaaaacggatagagcattttactttatcgcctttttcaaggaatttacgtgcattacgtagcttcgtatcgaagtcatgttcgtcaatcgttggacttaaacgaacttctttcatcacgatgactttttggttcttacgggcttctttatctttcttctgttgttcaaaacggaatttaccgtagtccatgatacgagctactggcggtttcgctgttggagcaacaagcactagatcaagattagccttttcagcaatttgaagcgcatcgattttactcttcacgcctaattgttcaccgtcttggtcgatcaatcttacttcacgtgcacgaatcccatcgtttaccaacatgtctttgctaatggtgagccacctccacttaattttgttacaacaagatagaaaatagctgttcaaatctgcggcctgctaactcattcgttcggaggccataaaaaaacgggctgcttttcagcaatcccgcacattcaaaatcgcgtaagctacgcgacgaaagtttgaattttttgcctgaaaacgttcgtgttaacgaggcgagaagcgggttgcttcttctttcttgtttaataaccttatttactatatcatatggagtttttggtgtcaaggtgaattgtaaataaaatagtttcttcatctcttggtaaccttatacgaataaacgttctttttgtcaagagataattaagacttacatatttaaaaagctctcgtgattatacgagagctcaaagtatacaggtgtgcacaagtcctaattcttgataggttgtgtaactgttccatcaaatatagcctcagtctccccaacgtttatatattcgctaaacttatagcttacttcatctgtataaactggcaattcccacaggacacaaccatctacataactcccaccattactgatgtaatatggagatatccatcttccatctgggtctttgacagtatttgttatatacaattctggttggtattttactggttcattcacacatttctgaccagttaaatctatccagttaactttcttcaatctagttagtccacctgtatttgttatttcattaccatgcaaatctaatacctctagttttgataaaaaaccaagcatcacaatactttttaacttattattacgaatagataagatttctagatttttcaaatgaataagcgagtcagtatctctgagttcgttgttatctaaaaacaagcgagataaacaagcacttggaattccgtttaaatttttcagtctgtttctattcacagatagctcttctaacttagttagatcctttaaaggactaaggtcacttatttgattatgggatagatgaagttcttttaaattagtgaaaaattgcattcccgcaagagattgaatgttgctattatctccattgaaattttgtactccagatagttccttttgtgatacaaggtctgtaacactttgcttccctaaattttgtttcactgcattcgctaggccgggatctggaaaaacttggttaataggcgttggtcgttgaatactctcagcttgtacttttgttccagaacccatattaatgcacagacctacaattaacactagcattgctattactgcattttgtaaccaattattttttttcaacattctccactccttaaaaataaatttagaaacacaaaagaggattttcatatacttcctatttaacaaacgctgttaacctttttatgtccctttgtatacttatatgttagcaaaaataagagatgtttaaattaacaagcgttaataataatcgaaaatcagtaaatttttcaaaacatgttctaccttccttgttgtctgctattccaaattgtctcacatggcttcattcgtcgtattttttgcataaaaaaagcctcgtttgacaaggctttttttctatttatttgcaatttttctcaataagtataagaagtaaactactgccgcaacaatggctaatcttgaaactacatatatgaaaccccaaaaatcagctgcccccatattacacctcactctccaagtatttataactatgtactattcttccttgttttttctttttgtctaatgaagttaactttattgtacttcttaattcaaagtatctttttgaaccatacgcttgtatagtataccatcccgcgccatttaagtcatacccaactttctgcgcatatttatctgtcgttttagttttagcggaatctactttctatgccgcagtaccccaagtccccggcttcgaagtgtaacgcatagctagcccattattattaattgtataatggtttgacaaaactatttccccgattggaacatttccacttttgtaagtaaaaacgaaaggtaaaaatttcacaatttagcattctaatcccaaataaaacaaaaacccttgagaaatcaagggtttcagccgttaaatgattaacgaatttctttaatacgagccgctttaccacgtaggttacgtagatagtaaagtttcgcacgacgtactttaccacgacggataacttctaattttgcgatacgtggagtatgtactgggaaagtacgttccacgccaacactgttagaaattttacgaacagtgaaagtttcgctgattccagctccgcgacgtttgattacaacgccttcgaataattggatacgttcgcgagtaccttcgactactttcgcatgtacacgtacagtatcacccggacggaaatttggaacatctgggtttagttgactttttgtgatttcatcaatcagtttgttcatgtttttctctccttccaacaaacattcattcatattaataatgaagcggaatatcgttatcagactggtctctccagtcaccttatttaggttaccataaactagtttcgctgtaaagtttttttcttactttttctttgataaaaaagcttgaccttggagtatggtttaatgttacctttagtatatcaaatggaggtgtcagatatggaacaatggacggtaaaagaaatggctgcttatgtggggatttcagcggatacattacgatattatgaaaaaaataaaataattgtacctaatcggctggaaaacgggtatcgtgtgtataacacggaacatctattagaattaaagtttattttagtaatgaaatatgcccgattttctctttctgaaataaaattgatgatggaatggttgagaagcgagccttctgttgcttgtaatacggcatcaaaagagttacttgcgcttaaagccgcggaaatcaaacagacgattgcgcattatacgaaaatcgctgctcttttagaagaattgccgcaaattgacgaggtccaagattacagcactgtccaaaaagatgttaacacttttgtcgaacatattttcactgacatcagaaaggatgggttctaatggctaaggttgtggcaattattggtgatccacgagaaaaaggtacatcaagggatttatttcagaagtatttgtcattttttcaagaacacccaacaatcgaagtgaaaatctatgatattcgcgaattagcttttgaccctaatttacctgaaggctatcgtactgagcagacacctgaaataattgcgcttaaaaatgatgttcattccgctgatttacttctattttcttatccagtttggtggtttaacgtcccagctgtcttgaaaggtgtcattgatcatttattttggcgtggggagagctatagttttaaagataaaaaatatttccttactggaccttggcgaaaaaaacgagcgcggttgatttatacgattggcggaatggaaatacagcatcgtcttttcggtcgtccagcacttactgccttacgctatcctttatggatgagcggcgtgttttcagtgaaggtcacttcgattgatcgactagatctttctattagaagaaccgataactactataataaaaaagttactcatgcagcaaaaaaagatattcaattcttgctaaaaaagtaatttagaaagaaggttattgtatgaaaattactaccaagcattcatattggcaaataacgacctttccgcacctttttcctgtgaattgttacttggttttagaaagagatggcttaacgttgattgatactgggattttagcgcatgcgaaaggaatcatttcacttatccataaattaaaatcaccgttaaaacggattttattaacgcatgcgcatggtgaccatattggtggtttaattgcagtgaaagccgcttttccagaagcgcttgtgatgattggaagtagagaaaaattgcttgtggaaacgaaagaaatttatgcttttgaagcacagaagccattaaaaggtagttattcagacaggcttccagtgagaattgatcagattttaaaagatggtgatatggttggctccctgctaattatcgatacaccgggacatacacctggctcaatttccttttttgatgagcgtaatggccatttgtttgtaggagatttatttcaaacacgtggaggagcggctatttgtggggagaagcgatggttgttcccttttccagcgatgggctcttgggatcttccaacgagtattgcatcggctgaaaatttacagcttttcgatgtgacggagattgcttgtggacacgggccagtgaaagcgatggctgattttgacttaacaaatgtactaaagcgagcaaaggaacaagtaacaaatgaaaaagactagaaaaccaggtgctggctttctagtctttttttagaatcgggtaattttgatgtttacggctgtcccatatgccaattggtatacgaggccatcgacgaattgctcggtaaacgaacagtgaattaagccattaccgcctgcatctaaagctttcttttgtaattcctgtagtaaattttcaaagcctactgtttctaagtatgcttctggatcgcttttgattcttgggcgaacgcttttggcaaaaacaaccgttaggatatcatggtttacattaatcggtccagtagaaacttgaatatcttgccatctttgaccaattcgtttttggtcattttcttcctgcacataggcttctcgttctttttgacgctcggattttttggtttctttttcatcaggtgttccaaaaattgccatgtaaaatcacgtccttttattatttactgtcagaccattctttgagccaagttttttgcttgtctgtcaagggatagttttttagtaaatctgggcggcgttcgtaggttcttttgagtgattctttgtcgcgccattcttctatccatgcatgatttccgctgagtaaaatatctggcactttcatacctctaaaatcggctggtcgcgtgtagtgtggatgttcgagcaatccagttgagaacgaatccgttaccgcagaatctttattaccaagtacacctggtaaaaggcgaataacgctatccattacaatcattgcaccaatttcgccaccagttaaaatgtaatctcctatcgaaacttcatcagtaacaaggtgttcgcgaattcgttcatcgtaaccttcatagtgtccacaaataaaaacaagatgctcttcttcggcaaattcttctgccattttttggttgaagcgtttgccagctgggtccattaaaataactcttggctttgtttctggctgtttttctttgacagcttgaacggcatcaaatatcggttgcgctttgagtagcatacctgctccgccaccgtaaggatagtcatcgacaatatgatgctttccttctgcatattccctgaaatcagtcacttcaaccgcgacacgctcgttttcgatggctttttttataatggaattcccggtcactcccgaaaacatatctgggaaaatggatagaatgtcaattttcattaatctagcagcccttccattacttcgatggtaattttttggtcgtcgatattgatttctttgactacatcagcaatatatggaatcagtttttcttttttgtctgcgccttttacgacccaaacgtcattggcgcctggtgttagaatttctgtgatttcgccaagctcttcgccgtcagtcgtcacaaccgtacaaccaatgatttcatgaaagtaaaattcgttttcctctaaattagttagttgcgtttctttgattttaagtacgccttctttcatacgttccacttgatgaattccagtgaatccttcaaacatcagcaaatcaaagttcttatgtttgcggtgtgagcgaatgattagtttttcaggctttttgctgtttttttcgaataagtacacggtattccctacttggaatcgttcttctggaaaatcggtcgttgcgataacgcgaatttcaccgattaagccatgggtattaacaatttttcctacattatacattttctccataagtcacctctagcgtatttctactatgattccatctttcacaacaatggttttatcaaaaatggatttatcccacttgtctcctacttgtacatcaataattgtttccatttctcgctcgcgaatttcactgccaagttcaaggacttctaattgttccatttgaaactggattagttttttcttttctcggcggatgtcgagttcgtgggtaaagtaatctgccacacgctctggttgaaatttgctttttcgttccattttcttttgttcgaaatgtaactgatcgcattcttgctcaatttgtcgtttttgttcggtataatactcgattaattcttgtttacttgcttcggtcaaaatttgtttgacgacaactttttggatgatttccactggacacctccactagcgattatctccttattttaccatagtttttttggattcatctactaatgcctggaataattgttcactttctggatctgtttggaacattaattcgggatgccactgaacccctaagtaccaacttggcaaattgtccccttcgactgcttcaatcattccatcggcagttcgtgctgttactttgaaactaggtgctaattttttgataaattggtgatgcagcgaattgactaattttttatttggatggtgttttgcgagttcgcttgttggttcgatatcaattgtatgggagccgagttgttcatcgacgcgctgtaaatgttgtaatgctttcgtttcgacttggctaatatcttgatacagtgaaccgcctaacgccacattaactagttgcatcccacggcaaatagcaaaaatcggttttccagcgtctaatgctgctcgaaccaaggcgatctcatagctgtcccgcggcgggaaataggcgccgatttcttgggacggctcttctaaataaaattgtggcgtaatgtcttgtccaccggttaacagcaaaccatccacgagagaaattgcttgaacggcaacagacgggtcatctattggtaaagcgataggaaatccgccaactttttgaatcgcatctacatatcgctgttgcgtataggttacacggtgtccgtaaaaaacgtccactccttttactaatctgtttcctgtaattccaataactggcttcatcacaattcctccatttctattctattttacaacatttagtgaggtaattgcttctctgatgattgttaaaaaaagttataaaaaaactcgccaaattgacgagtttttgttattcgataatttcaagacgaatcttcttatcgtttttggagccaactgcgtagacaagagtacgaatcgctttcgcaatacgaccttgcttaccaatcacgcgtcccatgtcttctttactgacagacaatttgtaggttaacgatgtatccgtttcttccggcgtgataacaacgtcttccgggtggtcaacaaggggtttcacgattgagagaatgagttcttccattcgcgccgagacctccttatttacctaatttttggttatggaatttttccatgataccttcgcggctaagaagattgcgaactgtatcagatggttttgcaccattatgcatccatttcaaagttgcttcttcgtcgattttcacttcaaccggatcaagtaatggattataagtaccaatagtttcgattgaacggccatcacgtgggaaacgagaatcagcgactacaatacggtagaaaggtttctttttagaaccaatacgttttaaacgaattttaactgccatagtttaattacacctccataaagtcttacacaagtatatatattaccagtaaaggatttgtttgtaaagtgttttttctttacagaggatatttttttctttttatttgacggtttcggcttcattgcttagttttccttgttttagaagatggtaatagcgcacatatccagaaatattatgctctacatcgtcaattctgacgcggaaagactggtgacgaatgaagaaactgccgtctattcgcgctggatttttgtagtagattgctagctctggataaaaataaccatttaactgatataatgcgcgcttggtaatagtcttttccagttcatctagtggatagtcgcgaagtaacccttctaggccttctgctttcatccgcagcgacatctcttttgtagcgacagtaagctctaaaaaagttggaaaagtcgtttcgcgttcgtaaataaatagtagattgtcgaaagcatttttcaatccgaattcgtagtatgcctcatccggaatgtattttgtgatttcattggcgcagtagctcagccagtgatcatgattttgccaatagtcatcgcgaataaaatgatcaaaggattttgccgctgcctccagccatttggaatcacggtcgatttcatataagcgcagcaagccaaacacagcttctccgtcgtaataaataatccggaaaatatcttttacttctaaagaggggtattccaacacatgcgtgaacttcccgtcttcttcttgtagggaaagaatcgtattcgcaattttccgggatagtggcaaataggttttagttccagtgattttcatatatttagttaaagcaagcaatgtcgccgctgaaccgcctaatttaacttcacgcaactctggttcaattagaaaagctaaatcgtctttttcataaataaaattttgctctaaataagttaaagcgcttgtagctgcttctaaaattgttttatcgcctgttaattcgtatgcttctaacatcgaataagttgtacttgcgtggcgtaaactattatagtgtttaatttttttatcaaagcaagcaaaccagccgtagttgaattcgcccgtttgatttacttgactcgctaaataattcccagcgtttccaactagttcaaaaactgcatctggggttacttgtttggtatttctacgaccatgctcaagctcgcttgtttctaaatcataaattttctttccatcaaaaaaccatcctactgtattaaatgtgacaatggtggaatctacggttaagtttaattgagcttgatttttatttgtttggattaaatatctattcatattttcaacgttgatagctaaaccttcatcacctggtagaaggatagcgttcgcattaatttcttgttccattaaagctattttaaaattttcatttaaggcaatgcctcttctataataatttttcttcgtttttaaagcttttttattccattctcctaaattttcaagttgataatccacggctacatctattttaaaagaaatcgcctcttcggtttggttttttattgcactttttttcatttcattgattaaatttgctaggcaaagatagctaaagtttattactgtagctcgtttatttttatatccgatggttagaaaaccgtgccatttcccgttataagtggcgtgctcttctgcttctgtcaattgatcaataattttattttcaagttcatctaatatacctctccaaggcatatgtaccactccttttataatttccctgccgctaaattttcttagcgacagggaatcgttgtattgtggctctatttacggaaaagacgtagtaaaaacgcgcctgctagtgagaataatccaagcccaacccacggaagactactgtttgtatctccagttgatgggagatcacttgctgagatagaagtagttccatccgcgctataacctgaggaaagcattgttcctgaaccatttgagctcatgtttgtaacggttacgccagttcctccgttagaagttccagtagttcctccattggtagaaggatttggtccaccatccgcatcagcgtcagcatccgcgtcagcatcggcgtcagcatcggcatccgcatcagcgtctgagtctactaaaggcagaactgttacggatacatcatcacttgtttttacttcatcgccgtatttagctgttacttgaagatgaataacatctccagctttcaaattataattaggaatattgattgtataggttccatctgcatggattaagacatttccaattacagtaccatctggaagagtcaaattaatatagaaagttgttccaacaggtgcatctgattgcaatgatttcagaagggcattgatgttcatgtttttataaattgaggaacctgaaattgttttagttccttcatatattggatttacagttggtttttcaactaggaaatctctccagtcaatgtctacatcggcatccgcgtcggcgtcagcatcagcgtcagcatccgcatccgcatcggcatccgcgtcagcatccgcgtcggcgtcagcatcagcgtcagcatccgcatccgcatcagcatccgcgtcggcatccgcatccgcgtcggcatccgcgtcagcatcagcgtcggcatccgcatcagcgtcggcatccgcgtcagcatccgcatcagcgtcagcatccgcgtcagcatccgcatccgcatcagcatcagcgtcggcatccgcatccgcatcagcatccgcgtcggcatccgcgtcggcatccgcatcagcatccgcatccgcatccgcatccgcatcagcatccgcgtcggcatccgcatccgcgtcagcatccgcgtcagcatccgcgtcagcatcggcatccgcatccgcatcagcatcggcatccgcgtcggcatcagcgtcggcatccgcatccgcgtcagcatccgcgtcagcatcagcgtcagcatccgcgtcagcatcagcgtcagcatccgcatccgcatcagcatccgcgtcggcatccgcatcagcgtcggcatccgcgtcagcatcagcgtcggcatccgcatcagcgtcggcatcagcgtcagcatccgcatccgcatccgcatccgcatcagcatccgcgtcggcatccgcatcagcatccgcgtcggcatcagcatccgcgtcagcatcagcgtcagcatcagcgtcagcatcagcatcggcatccgcatccgcatcagcatccgcgtcggcatccgcgtcagcatcggcgtcagcatccgcatccgcatcagcatcagcatcagcgtcggcatccgcatccgcatcagcatcggcatccgcgtcggcatccgcatccgcgtcagcgtcagcatccgcatccgcatcagcatccgcatccgcgtcggcatccgcatcagcgtcggcatcagcatccgcgtcggcatcagcatccgcgtcggcatcagcatcagcatcagcatcagcatcggcatcagcgtcggcatcagcgtcggcatccgcatccgcgtcagcatccgcgtcagcatcagcgtcagcatccgcgtcagcatcagcatcggcatccgcatcagcatcagcatccgcgtcggcatccgcgtcggcatccgcgtcagcatccgcatcagcgtcggcatcggcgtcagcatccgcatcggcgtcagcatccgcatcggcgtcagcatccgcgtcagcatccgcatcggcgtcagcatccgcatccgcatcagcgtcagcgtcggcatcagcgtcagcatcggcgtcagcatccgcatcggcgtcagcatccgcatcagcatccgcgtcggcgtcagcatccgcatccccaacatccgtagtaataaacccacgagccgcattactattcaacaaatcaacatctaaaagcccatcaccagttctagcagcaaagtctaatttcccatcattggcactaggtagcgcagttacgccaagcgctagcaaatcaattgtcaaagtgaaagtagatacactaccaactccgactcccagtaagtgatttactttcgcaccaattgcatttctactagaatcaataaagaaattgcttgagctacttccatttactgtcccttgattaaataatccaataccgccaattcctaaataagcaattttatagtcaattttcatatttgctcttatatttggattactcaaaatagaagaaagttcacttggcaattcaaaatatggatagtatgtggataccgcactagcactaactaactgattcccagaaagagtaatcactaatttcccattagaatactgtgtattcaaattagaattccctagcaaatcaattgttgccgcatccgcttgaataccacttagggcaaattggtgattaaaagaatcgtaattcacagtgacaggcgctaccatcatcgttgttgtcgtaataagcgccgcaattaattttgctttttgcgctcgcttttggtctaatctccgtttgtaatctacacgctgttttttcatcatttttcccccttaaaaatcaattgttcttgattttgaaaaataactgaaaacagaataaaggtatttaattatgttttcctaataagctaactattaagtatcccctgaacctttatccaatatcagataccaaccatttcagccaaatgcccctcccctcgttttcgaacctaacactagttgttataacccgttagataactttactatatagtatatttttaaaatttaaagtaaaaagtactagaaccaaaaaatacttcaattcgattcttttagtctaaaagttacacaaatatacgtatttatagcctatatttaaactttaggactgttcctgtaagggtattaagacctacaaagattaactttacatgaattgtctttcaattgtatacaaatctttttaaaatggttcttcacttcagattctatttgtacgcaaaaaaaatagccctttttcaagggcttacttttttaataaagatatgctttttttagttgttcttttttagcatcggttagtccgagtttttcttttaaaaagttgtccatcgaaccatattttgcattaatttcatcgaaggctgcattgatataagattcacgaacttccattacggctgtcattccatcaatcacttttttattatctgtttttgctgcaacggcttcaattgcttttttattttcgtcagcacgatatttattggacagcatataatcgtcaatgaccgtgtttttatccacacctaacgctgaaagaacgagggcggttccaaatccagctcggtcttttccagctgtacagtgccaaagaacagaaccatcttggtttgctagtagtatatcaaaaaaatctttataggcttgtatcgaagtttcatctgtaataaagctcttattagcattaatgagaaatgtctctggattatccattttggctaggctagcagttaaatcttgtgtgcttgtagatgttccattatctttcatcacagaatcgtgcgtatagtctacatctgtgagtttcggatctggtttcgttgcgacttctgaacttgttcggaaatcaactatatgagacaaatcatatgtatttacgagtttctttttatccgaatcacttaagttagcgagttcggcacttctaatgagtttatgtggcttaatggttagtccatccgttgttttgtatccgcctaagtcccggacatttacagcgccttctaatttaatttggcttcctggtttgagtgtttgctcggttttaacatttgcttctgctttttcttctgactgcgccccgcatccacctaatagtaaagtcgcgcttagtacccctgctcctgttacttttacccaatttttcattctttctcctcctttttgattgcttcgtgtacattatagcaacgcaatttgttggttgaatgaagggtttgtaaagaaatcattttagggatgttaaggtatgaaaaaaagccaaaacccggaatgggttttggctttctgaattaaaatggcatcttgaaattgccgaatgggtttttgccttttttgcctttgccgccaccagtcatttgcttcatcatttttttcatttcagcaaattgttttaggagacggttaatttcttgaaccggacgtccgctaccacgtgcaatccgttttcttctacttgcattgatgatatctgggttgtctttttcatttttggtcattgatttgataattgcttcaatatgacctagttgtttatcatcgacgttcatgttgtcgaggcctttcattttgtttgcccctggcatcattttaagtagttcgtctagtggtcccatttgttttacttgttgtaattgttctaagaagtcatctagcgtcatgctgttgtctttcattttttgttccatagctttcattttttctgtatctacatcggtttgcgctttttcaatcagggaaagcacatcccccatgccgagaattctggaagccatacgatctggatggaaggtttcaagggcttccattttttcgccagtcgcgataaatttaattggtttaccagtgacggaacgaatcgaaagcgcggcaccaccacgtgtatcaccatctagtttcgttaatacgacacctgtaatttctaattgttcgttgaagctttgcgccacgttgacagcatcttgcccggtcatggaatcgactacaagtaagatttcggttggcgttgcaatttctttcacttgttttaactcatccattagcgtttcgtcaatatgaagacgaccggctgtatcgataatgacataatctaaatgttcttcttttgctttagcaatagcttgtttggcgatttcgaccgggcttacttggtctcctagggaaaataccggcatatctaattgcttgccaagggtttctaattgtttgattgcggcaggtcgataaatatctgctgcgacaagtaatggtttacggttatattttttgcgtaataaattagcaagtttgccggaagtcgttgttttaccagccccttgtaaacctaccatcataatcacggttggcgggcggtccgctgttccgattttgctttcttctccgcccattaagcttgttagttcttcttgaacgattttgataacttgttggccgggtgttaggcttttcataacgtccgcgccgacagcacgttcgcttactgttttaataaattgtttaacgactttaaagttaacatcggcttctagtagagcaaggcgaacttcacgcatcatttcttttacgtcagcttcgtttactttccctttaccgcgaattttgttcattgtttcttggagtcttccagctagtccttcaaatgccatgattctggcctcctaatcgatatttttaagctgttcgagcgtatctttcacttgctcgtccagaaaattcttcttggttaattgtgcttctaattgagtaaagagtttttctcgttgttgatatttttttagcatccctagtttttcttcgtatttttctaggctttcctcggttcttttaatattatcataaatggcttgtctactcacttcaaattcttcggcaatttcgcccagtgagtaatcatctaagtaataaaacgaaacatacgctttttgttttgttgtcagtaattcctggtaaaaatcaaataataaattcatacggtttgtcttctcaaacaaggcatttcacctctctccttttaaaggatacggggaaatcgcgggaatgtcaaggaaggttagacaaaagagaaaaaagccagaatgacgagtatcattcggctttctctgattatttttcgttatcaaccatatcagcaaataagccatacacatattcatttgcatcaaaggcttgtaggtcatccatttgttccccaagaccgacgaatttcactggaatgtccagttcgttacggatggcgatgacaataccacctttagcagtaccgtctagttttgtaaggataatgcctgttacgtccgttgtttctttaaattgtttcgcttgaacgaaggcgttttgaccagtggttgcatcaagtactagtaaaacttcgtgtggcgcattaggaatttcgcgcgtaatgacacgttttactttttctaattcgttcattagattgactttgttttgtaaacggccggctgtgtcgcaaagtaaaatgtctgctttacgtgcttttgcggcttgaacggcatcaaacataacagcggcagggtcacttccctcggcttgtttaatgacatccacgccggtgcgctcgccccagacttcaagttgatcaattgcgccagctcggaaagtatcaccagcagcaagcatgacttttttgccttcttgtttaaagcgatgggccatttttccgatggaagttgttttaccaaccccgttcacacctacaaataagataacggttagtccgtcttcttcgatatgcagtgcttcatcttctttttcgtccccttggtaaatctcgactaatttttcgacaatcacttcttggacatcttttggatcgctaatatttctaagttgcacttcgcgacgcagcgtatcaactagctccatgacagtttcaaaaccaacatctgctccgataaggatttcttctagttcttcaaagaaatcttcgtcgactttacgatagcgagcaaccatttcgttgatttttccggaaaagttgccgcgtgttttggataagccatctttaaattttccagaaacggaatcggtttgctgggttattttatcttttagttttttaaaaaaggtcattttatttactccttttatttaatgagttcggctgtttcttctaagcgaaccgaaactagtttggaaacgccggactcttgcatagtaacaccgtataatacgtcggcttcttccattgttcctttacggtgtgtgataacgatgaactgggtgcctgattcaaattgcttcaagtaacggctgaatcgcgtaacgttggcttcatctagtgctgcctctacttcatccaaaatacagaatggtactggacgaacgcgaatgatagcgaatagtaaagcaatcgccgttaaagcacgttcgccaccagaacgaagcgataagttttgcagttttttgcctggaggttgaacgacgatatcaattccggttgttaagagattttctggatcgagtagaaccagttctgcgcttccgccaccaaatagctctgggaaaacaatcgcaaattcggttttaatggcttcaaaactttcactaaaacgaattttcatttcttcgtccatttcgtccatgactttaaagagagtttcttttgcggcaagtaaatccgcttgttgtcctgttaagaaatcaaaacgttcttggatacgctcgaattcttcgatagcaccaatgttaacaatgccgagttcatcaatagagcgttttagcaaacgaactttcgaacgcgcttgttcggtatttacttctgacaagattttttcttcggcttgctctggtgttagtaaataagcttcttgcagacgatcaattcggttagcgatatctacttctaaacgaccgatactaatttccgcattatttttttgctccatataaaaactgatttgattatttttttgtgttagctccgcttctagtagttccagtttttcttggagttctgcgcgagtttgtcttgtttgcgtgagcttctcgcttgtttcagtcttatcttttcgtagttcttcaatggattttctagctgtttcttcgcttgtatggacactagttaagttggtttttaaggaagctagtttttgttcggcggcttctttttgttcgtaattttcatgtagcgttgttgttactcgctcgactgcttctgtagcagattgaagttgctctcgtttagcagcgatttgcgcttttaaggacgacagactttctagatctgctgcacgtttgctttctaaagctttactcgaacttgtcattgctttgatttcttcatcagttacttcaatttgttttgcgatttcaacttgttcttgcagtaaagtttcttttcgctctagtagtttgtttaattcttcgctaccatccgctttttcaatatcatatagttgtaattgtttattaaagcgctctagattctcggtttctcggtctagttttccaagtaattccttttcttgtaaacgtaaattttcaccaataactcgtgtttcttcgagttcttcacgttttttcgccatgctatctttagccagttgaaccgcggattccatttcacgagtggattcatttagttcagcaatcttctctgctaattgaccaagttcatgttttctcgttaaaatagatgattttccgcctttagttgctccacctgtcatcgagccgcccgcattcacgacgtcaccttccagtgtcacaatacgatacctaaagttgactaaacgagcaagcgtatttgcgccttttaaatctttcgctaaaatcgttgtacctagtgcattcaaaatgaccggagaaactttttcatcaaaagaaatgacctcactagcaagtgcgataaaagcaggttggttacttaaagcatttttcgttgctgccggtagttcgcgtggttgaattgtcgaaagtggcaagaaggttgcacgaccacttttcgtttttttcaagaaactgatggcttcacgagcaacgcggtcatcttctacaacaacgttctgcgcactggccccgagcgctgtttccatggcttgttggtatttcgcgggaatttcaacaagttctactagcgcacctaaaattcctggaatttccttttttgcttttaaaacttcccggactccttggaaaaagccagcataatcgtccgccaactcctctaaagtttcctttcgcgatttcatttgttgcactgtttcataatgtttataaagcgcacgttcttgcgttccaaaaacagcttcttgttttgctaaagtttgctgtacttcacggtaaatttccatttgttccgtaagctcactttggatttttgttaaatgtgttttggttgtttcgatttgagcgagcatatcttttctatcatcgacatgatgactattttctaaatctaatttgtcaattcggctcgtgatttgaccgatttggcgctcaatataacctaaatcattattgattgtcgtttgcgtatggcgcagatcaatataatcacttttgcggttttcgattgcttcttcggataaatcatcgtatttggcaagtgtcgcttctagcacttttttcgatttgatagcaatttcaagtgccgtttctttttcgagttttgagctgcttagaacttctttttgctcttccaatgcagtaattttttccgtaattaccgccagtgtttctgcataaacttgttcattttcgctactgtgctttttacgttctaattgaagatttcgctctccttctagttgttcgagcttttccgtttcgactaaaaggcgttcttgtaatttatctagcgcgatatctgtttcattcagtgcttgtttttcacgtgaaataactgcttcttcggcgtgtaattcttcgcgcaacttgattaaaacagtttggttttcgccaaattctttacgtacttcggctagtttttctgttaaggaactgatttcactcgcaagtagcgtcacttcgtatttttctagttcttcttgttggaataagtaatccttggcaatagaagcttgcatttcaagtggttctaattgtccttctaattcatacaaaatatcttgtacacggtttaaattttcttcggtttcaaataatttattttctgcttgttttttacggtgtttatattttaatacgccggctgcttcttcaaaaatggagcgacgttcttctggtttactgttcagaatttcatcgattttcccttgcgaaataatcgaaaaagactctctcccaagtccagaatccataaataaatcgacaatatctttcagtcgacaattctctttattaattaaaaattcactatcaccattacggtaaatccgtctagtaacagctacttcgctataatcaagtggtaaaaaatggtcttcattttcgaggataagcgatacttccgcaaaattaattggtttacgtgtatcacttccagcaaaaataacatcacccattcggccaccacggagcgatttagcggactgctcaccaagtacccagcggattgcttctgtaatattacttttcccgctgccatttggtcctacaactgcagtcatgccgggcacgaaatctatcgcaactttgtcagcaaaggatttaaagccattcatttctaatcgttttaataacatgtccggacacctccatttttgtttatctgtgtattagtttgtttatagcaaattgtgccgcactttgttctgcttgtttttttgttctgccgctgccttttccgagtacttgtccattaacaattacttgggcatcgaatgctttattgtgtgctggtcctgtttcaccaaggatatcatattcgatcaggacatcacggtcccgttgaacaatttcttgcagttgcgttttataatcaactgtttgtagatatgcccctgcatcaatcttcggaaaaatgacgcgttctaaaaatgtaacaactttatcaatcccattatctaaataaagcgcgccgataaaagattcgaatacatccgcaagaagtgctggacgagttcttccaccagctttctcttcccctttaccaagtcgtacgtatttagaaaaatgtactgcttctgcaaactcaactaaagaaggctcacaaacaattgctgcacgcatttttgtcatgtgcccttctgccatatctggatatttgttaaatagatagtctgataccgttaattcaagtactgcatcacccaaaaactctaggcgttcattatctttcacattttcccggcggtgttcgttgacgtacgaggaatgtgtaaatgcttgttttaataattctacatttttaaaatcgaatccaacgctttcttgtaattcttcccattgattcatttcacttgctcctctctttaataagcaagttcattttctaaacagccactagcgaaaagctgcttagaaaatgaaccaacaaatctcgtaaccttgaaaaagaggccacctgcgctacttgtctcgcgtgcggaagttaccacagcaaagataagtaacacgggcaccctcatttatccggtcacataaagttttatgcgttcgcctctatgtacttcactgcatcaccaactgtgttaatgttttcagcgtcgccatcagagatttcaactccgaactcgtcttcaagttccattactaattcaacaacatctagggaatctgcacctagatcttctttgaaggaagcttctaaagttactttggattcctcgacacctagacggtctacgatgatttttgtaactttttctaatacttctgccatttttcacttcacctccctccaagtattatataggattatttctcctacgtaaacaaaaatatttaaagtaatgcgagccaagaaaattcgcattcattaaccaattttacatcaccattccgccatcaacggatagtgtttgaccagtaatatacttcgaagcatcacttgctaagaaaagaactgcattcgcaatatcttcggttgttccgtaagcaccaagcggaatttgtgctaacattgcttcttttgttttttcgtctaatttgtctgtcatatctgttgtaatgaaaccaggagcaacagcatttacgttaataccacggggcgcaagttctcgagcagttgtttttgttaaaccgataacgcccgctttacttgctacgtaatttgcttgacctgcattaccaatcaaaccaacaacagatgccatgttgataattttacctgcgcgttgtttcatcattgtacgacttactgcttttgtacaaaggaaagttccttttaggttgatgttaataacgtcatcccattcgtcttctttcatacgcattaataaattatcccgtgtaattcccgcattattcacgagaatatccacacgaccaaagcgttcaattgcttgtttgaaaaaggcatctacatcttcggcaatggctacgtttgctttcattgcttctacttcaacaccatgttcagcaacgagttttgctgtttcttccgcagcttctgggctaccattgtaattgaagaaaatattcgcgccttctttggctaagttaatggcaatgtcacgtccaattccgcgtgatccacctgttactactgctacttttccttgtaaagtcattaattattctcctttcaaagttgctgcaacgcttttcactgattcagcgtcacctgctgacagtacagttacatcacgattgattttcttaattaaacctgctaagacttttccagaaccaatttcgacaaacgtatctacgccgtttttaattaattcttcgacgatatcttcccataatactggagaatagatttgcttgattagtttatcgctaatttcggatttatccgtagtttctttagcatccacgttattaaccactggaatctgaccatcagaaattttaacctctgctaaaacatcacggaaagcaagtgcggctggttccattaagctagagtggaaaggtccgctaacagcaagtggtaatacgcgttttgcgccactttcttttgctttttcgcctgctttttcaacgccagctgttgttccggaaataacgatttgtcctgggcagttaaggttagcaagttgtactgcatcgccttctttagttacttcttcggtgattgtttttaatgtttcccggtctacaccaagaactgcagccattgcgccagcaccatttggtacagctgcttccattaattcaccgcgtttacgtacaagataaatcgcatcacttgcttctaaaaatccgcctgcaacaagtgcactatattcaccaagactatgtcccgctacgtaatcagctttcacaccatacgtttccagtgcacgtaaaatagcgacacttgtggaaactaatgctggttgtgcgttttcggatttcgttaataattcaattggaccttctgtaataatttctgtgattgaaaaccctagtctttcgtcagcatcatcatagattttttttgcttcaggatattccgctgctacatcttgtcccatgccaactttttgtgctccttgaccgggaaatacaaatgcaattttagtcattagattctgttcctcctacttttactttgtctacttctgctttaattgtttcgaccacttgtttttcaaccatttcacgtacttgacggatagtggtaaaaataccattagcattggatgaaccgtgggcttttacaactggagcttgaacaccgaacaaacaagcaccgccatattcgctataatccatttttgcttttaaagccattaaatcttttttcaagaagcttgcagcgactttgtttttaaagccattcagtaaactcatttttagcatacttaggaaagcggcacctgttccctcgatggacttaagtaccatattaccagtaaatccgtcggttacaacaacatctgctacatccattaataaatcacgcgcttcgatgttgccgataaattcataagcatcttgatttttcatgagttcgaatgatttttttgttaaatcatttccttttgtttcttctgttccaatgtttaaaagtgctacgcgcggacgatcaattttacgcactttttctgcgtaaaccgagcccattaaaccaaattgtagtaaatgttctggttttgcttccgcatttgctcctaaatcaagcataacaaagccttttcctgtcacggttggtagtgtaggtgcaagtgctggacggtcaattcctttaatacggccaatgacgaacaatccggtagacattagtgcaccagtgtttccagctgaaatacaggcatctgcttctccgtcttttaccgcttgggcagcaagtaccatggaagcttttttcttccgttttacagcgcgaactggttcatcatcactttcaattttttcatcggtatgtataatttttacgcgggttttatcagttaaatattcatttatttttgtttcgtctccaaaaagaagaatttcaacatctttatattgggccacagctttcatcacacctaaaacaatttcttttggtgcgtgatctccacccatcgcatctacagcaattttcattatacgtcagtcctttattttcatttttgcgttgcgtgatacatttcaaatttgcctttaagtacaatttcatctccaacatagcttttcacatctacgattgtaatagctctgttgtctgttgccggacgtacttttgcttttgcgatgatgcgttctccttcgtttacagaacgaacaaagcgaacggttgcttgtgttgttagagctatttcatttgggatgacggcggttgctaaggaattagcttgggcaaacaaatgatgcccacgagcgattttatttcttttaaaaacgtgctcactacgcacatcaaaaatcgaaatagcgctcttgctaagttgaatatcaataatttcaccaatcacttcatcgatgggaaggctttttactgcatcagcataattgacactcgcaacatgtttgattcgctctctgagttcggggatagaaagtgctaccctatctaaacggatagtttgcacactgaccccaaatttttctgcaagctgctcatctgttatgaaaggattttcttcaatagcaacttgaagtttcatttgacgatcctttttagaatattttttcatgcacgtatcctcatctcttttttgtgaaaggtattaataccagctactaaacagtaggtaaaaaaaggaagttacctctgtaggataacattcagaacttcccttgtatttgttggtactttaatatgttattaaaaatcaagccaagttgcaagtttttttaaagattgttacataggtttaatctagtttttgctccgtgaagacgccttcttcctccagaagtgctactaatttttcgtagtttttgttctctaacatatcttcttcaaaaatcatatgaacggcatcttggcgggcaatctccagtacgcggtaatcgtgaaccatatctgctactttgaattctggaacaccactttgttttctgccgaagaaatctcctgggccacgaagttctaggtcgcgttcgctaacaacgaaaccatcgtttgtttctgacataatcatcatacgttctttaccgacttctgtttttgggtcagcaattaaaatacagtaagactgatctactccgcgcccaacacggcctcgaagttgatgcaattgtgctaaaccaaaacggtcggcatcgtaaatgaccatcatggtagcatttggcacgtttactccaacttcaactacagttgtggagacaaggcaatcaatttttttatcattaaagtcgcgcataatttgctctttatctgctggtaatagtttaccatgcatcagtccagggatatatttcgtcccccatttattttgtaaaatgttgaaaacgtctatcgcattttgcacatcgagtttttcagattcttcaatcaaaggacaaatgatataaacttgatgacctttgtcaatttctttttccataaaaccaatgacccgatcaagcatttgatgtttgacccagtaggtttcaatttcttttcgaccagcaggaagttcatcgataatcgatacgtccatttcaccaaatgctgtaattgcaagcgttcttggtatcggtgtagctgtcataaataaaacatccggatattcgcctttttcacgtagaacacgacgctgcgctacgccaaatcgatgctgctcgtcagtaataactaaacctaggcgatgataaatcacttcgtcctgaattagtgcatgtgttccgattaaaacatcaattgagccattttcaagcattgctagtaattctctgcgttgctttcctttcacgctacttgtaagcaaaccaactgtaatatcaaatggttgcaacagttctactaaagaattggcatgttgctcggctaaaatttcagttggaaccataagcgcactttggaagccacttttggccgctgcatacatggcaatagacgctacaactgttttccccgagccaacgtctccttgtagtaaccggttcatatgaaaatgtgataacatatcgccgcaaatttcattaactacacgcttttgcgcttttgttagtgggaaaggtaaggaatcaatgtaatggcgcaaatcttccacatcataattaatcgaaattccgcctgatttctcgcgttcaattttacggaaaaactgcattttcaattggaataacaagaattcttcgtagaccattcggcgcctagcttgtttcaattcctcattatttttaggaaaatgcagaatgcgcactgcttctaggcgatccattaattggtatttttctaatagattgcctggaataacttcttcaatatcttgactataactatcaaaagcaagtctcgtatatttttgcattgttttattgcgtagcgttccttttagacggtaaacgccttctagttcttcttcgctttcgacagcgcctattttaattttgctcgctgtaacttgggcgcggctcttgtcccatttgccagaaattgtcactgtttcgccaacgcttattttactttttaaatagggttggttgaaaaaatcgattttgatgacttgaccttcagttgagacgcggaaagagagcttggattttttgcgaccgtagaaagcaacggttgcttctgttaggacttcgccttgaatcgtaatccgttcttcatgcgccacttctgataaatcccgcaaccgataatcctcatagcgatacggaaagttccatagcaaatcatgcacggtggataaacctaactcttttaaagttttcgctgtttcttcgccaattcctttgatttcagttgtcgggattcgtttaagttcactcacgcttatcttctggcgacagtccaaaaatcttccgctgaattgcacgtccagtcggtgtagccgccaatcctccttctgccgtttctcttaaagagcttggcatttgtaagcctacgcggtgcattgcttcaattacttcatcacatggaatgcggctcttaatacctgcgagcgccatatctgctgaaataattgcttgcgaggaaccaagtgcattacgtttaacacatggtacttccacaagtcccgctactggatcacaaacaagtccaagcatatttttcatcgtcattgccatagcatgtgctgattgttcgggagttccgccggctgctgctacaatcgctgctgaagccatcgcacttgcagaaccaatttccgcctgacaaccacctgctgccccacttataaaagcattattcgcaacaacataaccaaaggcacctgctgtgaataaaaagttaaccatatcctcacgagtcatttccagacgatcttttaaagaaaaaagtacacctggtacaactccggcactccctgcagttggggtggcgcaaatgacgcccattgaagcattaacttcattcgtcgcgattgcttttgctacagaatccagtaacacttcacctgataagaagtttccttttttgatatagtcttgcatgaggacagcatctccgcctgttaatccagttgtagaagtaactcctgcctcaccttcacgaatagcttcttccataatatctaaattccgttccatcgcagccgttatttcttcccgcggtaaaccagaaatattcatttcacgcttaatcataatttcagcaatagttaggttctcgcgttccgcgatatctactaattctgctacagttctaaacattgtccacactcactttctttactctttaccaacatacctgatttacaactcaaaataaagccaaatgcacgttttgtttacgcacatttggctttacacaaatcgagcgaaagccaccgatttactagaaaactactaaatcatgacacttgctacttgataaatccctgataattcagcgattttgctaattaaagcttgttcaacttgttggtctacttcaatgaccattaacgcttcgtcgccttttactttacgggacactttcatttgaccgatattgattttatggtcggcaatcacggaagatactgcagcaatcgcgccaaatttgtcttgatgtaaaataagaatagctggagcagttccagtgaattctagttcgaattcgtttaagcgaataatctctactttgcctccaccaatggatgcaccaattaatgtcatttgttgcatgccatgttttaatactaactttacagtatttggatgaggcggctcttccacttcttcaataaactggatacgcatgccccactcttcagcaagcttcggtgattctttcatacgcggatcatctggctcaaaaccgagcaatccaccaatcagtgctacatctgtaccgtgacctttataggttttggcaaaagaaccatataaatgaatatctacttgggatggttgttcattaaaaacagctcgtgcaatggcaccaatacgactagcaccggcagtatgagaacttgacggaccaatcattactggaccaataatatcaaatacgctattaaatttcactaaaatcatcctttcttctatccatttaattaggcgtctttattctacagcaaatatatacggataaactggttggtcaccttcgtgaatttctacttcgacatctgggaatgcttctgttactttatcagcaagtgtttctgcttttgtagtatctgaatcttcaccaacaatgattgtaacgatttcgctatcgtcatcaagtagtttttctagtgtttcgtaagcggcttcttctaatgttgcacagctaactttgattttaccttcgaccataccgatgaagctgtcttttttgatttctacaccttctaccgttgtatcacgaacggctgtcgttacttggccacttgctacgtcttcaattgctgctttcattgcttctgcattagctaagaaatcttgatctgcttggaatgaaagaacagcagtaagtccttgtggaattgtttttgtagggatgatttgcactttatcatctcctagaatttgcgctgcttgttccgcagccatttggatatttttattatttggaagaacaaaaacttgttctgcattggctgattcaattgcttttacaatatcttctgtacttggattcattgtttgaccacctgaaagaacaacagatacacccatgctctcaaatagtttcttcaatccttctccagctgaaacagtaacaataccgtaagccgctttttctttcgctggtgctttgtcatcaccaacaatttcattatgctgttcacgcatattttccactttcattttaagtagactaccgtattgttggccgtagtttagcacttcacctggatgttccacatggacatgtacttttactacttcatcatccgcagctacaagtaaagaatcaccaagtttacttaaatcttgacggaactgttcttcatcaaaaggtttttgacctggtttgttttcattgatttttacgataatttcagtacagtaaccaaaatgaatatcttcagttgacataaagtcttgcacatgacgatgatgttcggcattgattagttcacccatagatgccatataatcaggagcttcggccattttgccagttagtgcgccataaaatccttcataaataatgataagaccttgaccaccactatctacaacaccaacttcttttaaaactggaagtaaatctggtgttttttctaaagctacttttccttgttttaaaatagcttccatcactaattcgatatcctgatgttcatttgctgctgcaactccggcttttgcggcttcacgagctacggttaagattgttccttccacaggtttcataacagctttgtaggcagtttccacgcctttaacaaaagcaccagcaaattcttccgcatttaaggtttctttgttttcaatcgctttagaaaatcctcggaaaagttgggataaaataacaccagagttcccacgggcacccattagtaagcctttagccaagttggctccaacggcactaattgtttctttgtcatttttcgcaacttcttctgctccacttgtcatcgataggttcatattcgttcccgtgtcgccatctggaaccgggaagacattcaatgaatctacaaaatcagcattttttgctaaattctctgctccaagcgctatcattgctgcaaatttctctgagtctaactgatatatactcacttacataatcctccttaagattccttgattactcggacaccttgaacataaatattcactgattccactgtaataccgagtgttttttctagtgtgtatttgacgcgttcttgaacgttatgtgcaacttcggatattttagttccaaaactaacaatgatatacatgtcaatatgtataccttcttcttcttgtctaacgattacacctttagtataattttctcttctaagaatatctgttaaaccatcacggatttgatgtctacttgccattccaacgatgccaaaattttcttcggcagctccaccagcgattgttgcaataacgtcactagtaatgtcaattttgcctagctttgtgtcgatttcaattgccattctatattcctccctacggattatattctcgttcgattatttttttattttgattttatttgatagtaaagttgtccctacctattttactataatcacggccctttggaaagcatatcctaaatttgcctgattaaagctacttttatgctgtcaagtaaaaattctttgcactattttcgcatatcctcttgcaaagtatacttgtttatgataaattattctagtgtatgaaaaacaaatggataggttattttaaataaattatccgaagagctctgtaaggaggggtaaactatggctaaagaatgtgttattacaggccgcaaatcacgttccggtaacaaacgttcccacgcaatgaactccagcaaacgtacttggaaagctaacttgcaaaaagtacggattctggttaacggcaaacctaaaaaagtttgggtatctgctcgtgcgcttaaatctggtaaagtggaacgcgtttaattgaaggagaaatcaagtgcagcgacaattatgtcggtgcattttttctttgccttaaaataaaaaaatacaggccacgtgcacctgcatttcattttaatcattgctttgtgttaataaaatcattccacttttaaaggaaaactctcccatttgtcccacaaactcattacttgatagagctgagcctactgggtaagtagcattttcgagtgggtaggcgaatccttttagtgtcagtcctgtaacgtctctcattgttgtaaatgcgacatactttttatctggcagtttttcaatggtatagctacctggcgtatacattttgatgtagttatagcggtcaatcatttctacaactggcacagcgcttaaaaattttggtttggtcaacatcattagatttgcaagtagatggtctaagcggcctcctgttgcaccaaaaatacgtatcttatccggtttttgctccattgcccagcttaatccaatttctgtatctgtttcatctttttcagctggaaattcaagtacatctgctacttttgttttcaaataagttagctcttctttagagagcgaatcaaaatcccccatcgcaatagtaggtattatgcctcggtctaataaccgtttagctccgcggtctacgccaatccaactaatctctccgctcgtatattgtgctaaatcaggaatttcggacgcaggtccaccaaccatgatattaattgttttcatacttgtaaccccttcttccctaataaataaggctggaacagaggtcccagccctactatttgtttactcgcctacaatggcacgtaatttatcaattggtgtttggcgatttttatttccataaatgtaactaccagctacaaatacatttgctccggcatcacggcataattttgccgtttcatgatccacgccgccatctacttcaatttcgatatctaagccttttttatccacaatttccttgaaagcactaattttttctagtacttctgggatgaatttttgcccgccaaaaccaggatttactgtcataaataagaccatatccagttcatttaaaacatgttgtaaaacatcgattggtgtcgctgggttaagtactgctccggctttcacaccataagaacggattaattgtaatgtgcgatgaagatgcgtacaagcttcgacatgcacggtaatgtagtctgcacccgcttttgcaaactctggaatgtatgtatccgggttttcaatcattaaatgaacatcaagtggtagtttcgtttctggacgaatggcttggacaacagcaggtccaaatgtaatatttggaacgaaatgtccatccataacgtcaatatggatgtaatctgcaccgcaattttctacttctttaatatctcttgcaagagttgcaaagtctgcacttaaaatcgaaggagctatttttcccattcttaatacctcggctttctgttttttaattcttgtaaaatttggatatagtgtttgtaacgaaattctgctatttcatttgcttcaacagctgttttcactgcacaactaggttcgttttcgtgcatacagccacggtatttacaaccactacgtcgatcttctatttctggaaagcaaaattgtaatgtttcaggttgtaagtcatcccattcgatagaactaaagccaggcgtatcagcgacaaatccatcgccaatcggcatcagttcgacgtgtctcgttgtatgttttccgcgaccaagtgaattcgaaatctctgctgtttttaatgttaggtcactatttaggctatttaggagtgtcgactttcctacaccagattgcccggcgattactgctgttttcccactaatatagtctttaattgcttctttatccggttcatcattcgtaacaaaaacatcatagccaatcgcttcgtaaatgtctttgtaaacagcaatttgctctttttcagattctgatgccaagtccattttactaatgcaaataactggcttgatatcttccttctcaatagctactaaaaaacgatccgcaagattcgtggaaaaatctggctctactgctgaaaaaaccaaaatcgcaatatcaatgtttgccacgggaggccgtacaagggcattctcccgggacattacatctaaaatataaccatctgttttattttctatttgaaattctacatcatcgcctacaagtggagaaatatttcgttttctaaaattccctcttgctcgacattgatatacttttccttccgaaaatacatagtaaaatccgctcaacgctttgataatttgtccttccagcacatttcctccgttctatttttaatttggataagggactgtaccttcatcgattactttatcatcactgataattttatagcctgcgctagaaccttcttcaatttggaaagttatttctaccgaggtattttgtgtaatgctcatttctcggtaagcgctagtcatgctatggtctttatcttgaatgtagatttgaattttctgtggttgtgggttttcttcatcacttggtgtataagggatgttaaatgttttagttacttcttttacttgtttttcttttggtccagcagaaatgacaatctcgattgtatcaccagagttcattgctgttccagctgatggggactgtgaaataacttgtcctttttccactgtacttgagttctcttctttacttgaaacttttagcccaagtggtgaagcataatcttctactgctgttttagtataacctcgtaaatctttcagtgtaattggctctgcacctttacttacgacgaatttcacatctgttgatttagcgactacttctgttccttgtgtcggtgtttggctaataattaagcctttttcaatttctgaactataagcttcctccgaagaaatatttttaaatccctgttcttcaagtaaagcttttgtatctgtgtaacttcttcctgtatagtcatccatggttatttttttagaaccaatgcttacgaataaattgatttttgttcctttttctttcatttctccagcttctgggtcggtattaattactttcccctcatctacttcatcactatttttttctgctgttttacctatgacaaagccttctttttgaagtaacgccactgcttggtcttccgttttaccagaaacgtccggcacagcgacttcatcagggctcttgcctaaaagccacagtagtaaaataccgatgataaaaatgataatgacagaagaaacaatgagagcaattttctttttcttgctcatttttttctttttcttatcttttttctcctcaggaactacttcggcagcggctacttttccttctggaacaatcgttttatcaaggttttgcatcgtatcttttgttgcgatgattggaattgcttttgtatcaccatcatctgttgggaaaacatattttggctcgttcaaacggtctttatttaaacaagtttgcaagtctttttccatttcttccgcgttttggtaacgtaaaaatggatctttcgccgttgctttaatgataatattttctaagctttgtggaatttctggattttgttctcttgcggatgggatgtctgcttgcagatgcttaatagctatagaaactgctgactccccgtcaaaaggtacttttccagttaatagttcgtataacacaatgccaagtgaatagatatctgatttttgtgttgccattccgccacgtgcttgttctggggataagtaatgcaccgaacctagtaaagaattcgtttgtgtaatagatgtttctgaaagtgccattgcaataccaaaatctgtaatcttcacgacaccatcatgatcaattaaaatattttgcggttttaagtcacggtggataatgtgatgttgatgggcgattgctaccgcagaaacgatttgcagcataatatctactgctttttcataactgattggatgattttcgtgaatgtactgttttaaatccatcccatctacatgttccattacaatatagtgtaaatcattttcttcaccaacatcgtacacactaacaatattagggtgaacgagacttgttgctgattgagcttctcgttggaaccgacgaataaggttgctttcatctgccaaatcgattcgtaaaattttcactgcaacatctctatcaagaataatatcatgcgccaagtacacattggccattccgccgccgcctattgcatgtaaaatcttatatcgatcgcttaatcgcttaccaatcatcatgaagcatccctccctttctgcgtcagatctcgttcgactaacagcacagtaatattatcttctcccccataagaattagcttttgtaataaatacatctgctttttcagaaagagttcgtttactttttaaaatttcttccatttctgtttctggaaccatattcgttaaaccatcggaacaaagtagtaacgtgtcgctcgtttgaaaagggacaacaaatgtgtctacttctactttcccttctacaccgagtgcacgtaaaaggatatttttccgcggatgattcatggcatcttctttgctgatttcacctgttctaaggagttcatgtactagtgaatgatcttcggttagctgacgtaagacatgattttgaagtaaataacctcggctatctcctacgttagcgataacgacttgtgactgcgccataattgctgcaacaagtgttgtccccataccattaagatccatttcactttccgcataaaggacaatttctttattgacttcttggattgtttttcgcaaccaagtttcaatttcttctgctgtcaaaagcgcggtcgtttctttccatgcgtcgcttagtagacgaacagccatttcgctcgccacgtctcctgcccggtgaccgcccatgccatctgcaacaatgacaatcggctggttatctttattttcaaaaacgccgccgttgtcttcattatgatgtcttattctgcctctatctgttctaaattctgcatgcattttaaaagcacctcactatttttcaggacttcacttttctaaggctagaaacgaagaaaccatcgcttccaatatctgttggtaaaagttgaataaaatcgtccttcttgatttgcgccaatttttcagggagtactactggttctagtgtaaaatctggatgtttttctaagaaagcgcgaagaaccgtttcattttcttccttgtcaatggtacaagtactataaactaatataccattttcttttactaattggctaacatcatctaaaatcgctaattgaatttctgctaatttgtggatatctttttctgttttcgcatatttgatgtctggttttctgcgaagaacaccaaagccggagcacggagcatccactaaaatacggtcaaatgtttctggctcaaacatagtactcgctgttcttgcatctaaatgtgccgtacgaatattgagtagctgcaatcgtttggcggcctcatcaattagtttggttttcttttcgtgaatatcaagcgcatgaaccatacccgtgccatgcattttctccgcgatatgggttgttttcccgcccggagccgcacaagcatctaatacggtcaaattgtcttctagttgaagcgcataagctgcaagcattgagctttcgtcttggatgctacatttaccgtctttatatgctttggtttctgctacagaccctttttcaacaagtaatgcttcctcaataaattcattacgtgtcacggtaattccttggtcatttagctctttaataagttgttcagtaggaatttctgtttggttgacgcggatactttggtgcggtgcgactaagaaagcgagaccaatttcgcgcagttgttcgatgccatattgatctgcccacctttttgctaaccattctggcagacttgtctcaacagcgattttttgcacagggtctttgattgcatctatacttggtactccttttcggataacattacgcagcaccccgttgacgaatttagttacaccttggtgccccatatttttcgcaatatcccctgcttcatttaaaatcgcgtgttcaggaactttatctaaataggttaattgatagacggacattcttagtaggtttttcacccagttgtcgggttctttatttaaaaatggtgctaagtagtaatcaagtgtaattttacgttgcgttgtaccgtatactagttcagtcaaaaggcctttatcaagcggatttagcttttgtttttttaatgcgtcattaattaataagtggctgtatgattgattattttcgattttaatgatgagttctaatgcaatcgcacgaactgttttttgttttttcatttattcaccaaaccttgtcgtcttgcttaaatttctgccagctccggtcatgaatgagtgaacatccatcttcggttttcctgctggttggattactgttggtacgatgagcgtgccgtcgcctgctacgattttaagcgttgttttatctgctaaaatggcacctggttcgccgccctcttttgtatcttcataagtagcttcccatattttaaatggtttttcttccagtgttgtataagccactggccaaggagataatccccgaatttgattaaagatagtacgccctggttttgtccagtcgattttttcttgttctctagaaatattgcgtgcaaaggtcaccttttcagggtcttgtggagtagcagttatttttcctgctaaaaagtcgggtaatgtatccatcaataattctgcgcctaatatgcttaatttatcaaacattgtgccagtattatcttcatctgtgatggggattttacgctggctaatcatatccccagcatccaatttctctaccatatacataatggtaacgcctgtctccgttttcccgtcaagcagcgcgtagtgtacaggagcacccccgcgatactccggcaaaagagatgcatgcacattaatcgcgccatgctttggtgattcaagtaaactatttggtaaaatttgtccgtaagctgctgttacaagcaggtcggcttctagggcaattagttcttctaattcgctagatgtccgtaatttttctggttggtagactggaatagctagttctaaagcagctttttttactggcggtggtgttaaaactcgtttgcgtccaactgggcgatctggctgtgtcacaactgcaactacatcatatgtgctggctaattgcgttaaaacagggacagaaaattctggcgttcccataaaaataattttagtcattggtttgctccttttacattagtacgtaaggctgtacgtcaatagttattgttagacctttttgttggtctttttgataatgggtaattaatgtttttagttctttttttaagtttggttcgattttatatttaatgatgcactggtagcgatatttatttttaattctagtgattgtactaggaacagggcccagaatcacggcgtctgggccgagcttccctcgtaagaactgggccatttcttgaatggttcgaatcgctttcatttcattttcatcgctgacattaatcattgttaagtaataaaatggcgggtatgaacccattttccgcagttgcatttcgtggttataaaaaccgatgaaatcatgttttttggcgaattcaatactgtaatgttctgggttatagctttgaacgatgacttcccctgtccgctcatgtcgacctgctctcccgcttacttgagtgaggagctggaaagttcgttccgaagcgcgaaagtctggtaaatgaagcattgtgtcagcattcaatacgcctactaaagtaatatctggaaaatctagtcctttagcaatcatttgtgttccaagtaaaatatcggcttcgtgattgcggaagcttttgagtaatttttcatgggcaccttttgttctagttgtatcaacgtccatccggatgacgcgcgcttctggaattaatttggttagactttcttctactttttgtgtacctgtgccaaaataacgaatatgctcgccctcgcagctcggacatttttgcggaacacgttcttcatgtccgcagtaatggcatttcatttggttgctcgattggtgataggtgagcgaaatatcgcagttcggacattccacaacataaccacaatcacggcacatcacaaaggaggagtagccacggcgatttagcattaaaaccgtttgttcttttttggcaattcgatctttgattttttctagcaattcagtcgaaaattcggtgcggttttctttgcgtaattcttcgcgcatgtcgacaacgctcacttctggcatcgcccgatcattaacccggctaggaagttcgattaacgtatacacgcccttcttcgctctagcaaaagattcaagggacggcgtggcgcttccgagaactactggacattgatattttgttgcacgccaaatggctacatctcttgcgtggtaacgcggattatcttcttgtttgtaactcgcttcgtgctcttcgtcgataataataatgccgagattttcaaacggtgcaaatacggcggagcgagccccaacgacaacgcgcgcttctttacgttcaattttacgccattcgtcgtatttttcaccggaagaaagtgcactgtgcagtaccgctacctcgcttccaaaacgacttttgaatctctctaccatttgcggagtaagggaaatttctggtactaaaacgatggcttctttgccttcttttaattttgcttcgatagtttgtaaatagatttcggtttttccgcttccggtaaccccgtgtattaggaatgtttcttgaccagttgctgcggtgattttcttacaagctgtttgttgatctggtaataactgaagcgattcacttttttcaaattggtggttttcatagggatcccgcgaaataattttttcttgaatggaaagcatccctaaatcaactaattttttaatcgttgcatcagttgtttccgcttgtttttttaactcggctgctgtaatttcgttgccttcaagagcttgaaaaaatgcgagtacacgtgattgtgctttggcatttttcggcatatcttctattatttcagctagttggtgtggtgcttttaggcagctcacaacgcgaacttttttgttggtgattttatttttcacttggtagacaacttcgacgctgccttctcgcacccatttgccaatttgtttgagcaaaccacgtgcttcggctactttccaatcaagcgtttcataaccttcaaatagctgttctagttcttcgttttcctcatctaagcgcaaaaaatatttttcatattttgctcgtagcgcggctggtaacatggcttggtaagcagacacccggaaactcagcgtatcttctgctaaccaatcgcctagctccatcaattcttcatttaaaacgggggctaaatccatcaccccgtcaatgccttttaatttgggattttcttctgtttctccaagagcaatgacaaatccttgtattttacgatttccaaatgggacacttactcgcatacctggacgaataagttcttctaaatcttctggaatatagtagtcaaatggacgatccacttgcatggctggaacgtccacaattactttcgcaatattaatcattcgttcacttccttaaaaagttagcggcttctttgatgatatgttcagcaacttcttttttgtctagtatcggtaacgcttcactggaaccatctttccggtaaaatgtcacgatattcgtgtcaccggaaaagcctgctccggcctcactaatattgttggcaacaatcatatcggcatttttggaggttagttttttacgtgcgtttgcttctacattttctgtttcagcggcaaagccaatcacgacttgctccgaagttttatgttgaccgatttcgagtaaaatatctttggttcgtttcattgctattgtaaaatcaccaggttgttttttaatcttttggtctgagacttgcgctggcgtgtaatcggcaactgctgcggtcatcacaaaaatatcttgtgacactttacgttcattcacagcttgatgcatttcctctgccgattcgacatagattgcttctactccatgcggtacgggaagtgccttacttgtagtaattagtgtaacattcgcaccgtgacgcgccgcagattctgctatgctaaagcccattttcccagttgaatggttggtgaaatagcgtactggatctaatttttcgcgagttgcgccggctgttactagcacatttttcccttgaaggaggtttttatcttcttgaaaaaattcagcaatacgaagaacgattttttctggttcttcaagacgaccgcgaccaacgtagccacaagctaagtaaccttcttctggctcgataaaacggacaccgtctgcgtataatcgattaatattccgaataactgctggatgctgaatcatgtggacattcattgctggtgctacccaaactggtgcctctgttgcaagaatggttgtcgttaccatatcatccgcgatgccatttgccattttaccaatcacatttgcagttgcaggtgcaacgattactaaatcggcccaatcggctaaatcaatatgtgcgactacacttgattttttttcgtcaaatgtatctgtgtatacatcatttttagataatacttggaacgaaagcggtggaacaaattcttgtgcatgtgctgtcatcattactttaacgtttgcacccgcttgcgttaatttacttgtaagtgcgactgctttataaacagcaatgccaccggacactgcgagtaagatattttttccttgcattgataagtcacctcatttttaatataaaaaatcattaattctattataccttaaattaagacaggacaaaaccatgaagaaactagatttcagcttatttttattgcacttgtggctaacaaaaaagctccgcaggaaagcggagcagttaagcttatttatcatcgttttgtaaaactaattttccagcgtgaatttcttctaacgctttcccaacaaatttgtcggattggtagctcggcaatacgcctttatcattttccagttgcatgtagcgtgcgcgtttagcagccactgtaactagcgaatattttgagtcgatttttaacaataaattatcaattgatggatataacatcattgtaatccctccaacatttttttgtagcgatgaattactcgctcagtttttaagtgttctgtttcgacgatgcctttgattttttgtacggcgtttgctacaacatcattcaccacagcataatcataagacgccatcatttcgatttctttcttagctgtttccatgcgttcctcgacaacttccatcgattctgtgccgcgaccgataatccggttttttagttcggataaatctggtggcgttaagaaaatgaaaattccttctggcatcgcttttcgaacttgcattgctccttgcacttcaatttcgagaaaaatatccactcctgcggcaagtttttcctcgacatattcaagcggagtgccgtaataattaccgacgtactctgcatattctaacatttttccgtctttgatagcttgttcaaaaacttctcttgaacgaaaataataatcgaccccgtcttgttcgccttcacgcggaagacgcgttgtcatagaaatagaataatcaaaacttgtttccggatctttaaaaacagcttcccgaacagttcctttacctactccagatggacctgaaagtacaattaacagtcctctttctgtcatcatttcccctcctgcatatcattccacattttgcacttgttctcgaattttttcaagcgtcgttttcatttctaccacttgttcagtgatttttagagaactagctttggagccaatcgtgttgacttcgcggttcatctcttgaatcagaaaatctagctttcgtccgattggttcttcgagtaaaataataccataaaattgctttaaatggctctttgttcgttcgacttcttcgttaatatctgccttttcaagtagcattgcgacttcggtaagaacgatacttggatcaaattggtcgcctacaacgttttgtaaacgtgtttcgattttttcttgataatgtttttctgtatttggaatttcagcttggatgatctccaagctattctcaagtgcggcgagatgttgtttgaaataaagcagcagttctgctccttccatacttctcatctcatccagtcgctcggttgcgcgggctagtgtttctaaaactaatcgctctagttcgctacttgcttccacttcttcctcaatagaaagataggcttgttcttgcagtaaatcacccatagttggtaattcttgtaattcatatctagcgcttgcttgtttgataaaacggtaatagctgtctgcgaggtcccagtcaatatgtagttcacgttttgcgatttgctctcccgtgatggaaaagaaaacttcaattctaccacgtttgatttgcttacttatagttttttttaatttcccttctaaataagcgagttgctttggcatccgaaaaaggaattcggagtagcggtggttgactgcttttaattcaatggttactttgaacgcttcaaattcttttgtggcacgcccaaatcccgtcatgcttttcaccatttggcaagacacctttcataacttaaagttccctctaagattacttgaaatttgttctgacttcttattataccaaagctactccttgcatacaatacattttcggaatgtatgttaaaatagaaagtaactaactcacaaaggaatgaataactaatggcgtttgatgcaatgtttttaaaagcaatgaccgaagaacttgccgagcacggagaaagtggtcgcattatgaagatccaccaaccgttttcgcatgaacttgttttatatattcgaaaaaaccgtgaaaataaacgtctacttatttcctcgcatcctagctatgcgcgcattcagtggacagatgatattcctgaaaacccagcaacaccgccgatgttttgtatgttactgcggaaatatttagaaggtgcaattattgagtcgattacgcaacttcctaatgaacggattttacaatttagtattcgtggcaaagatgacatcggcgaaaaccgtttttgtgatttatttgtagaaattatgggacggcatagtaatatcacccttgttgaccgtgcgaaaaacgtgattgttgattgtattaaacacgtttccccagcgcaaaatagctaccgaacacttttgccgggagcgacgtatgttttaccaccagcaacggataaactgaatccattcgaggttacttcggagcagattctggatagactggatttctcagcaggtcgaattgataaacaactcgttcaaaactttgcgggattcagccctttgcttgctcgtgaaattgtgtttcgcgctggaaacttaacggcagattcgcttgtcgccgccttttttgaagtaatgggacttgtgaacgaccatctaggaagtgccgctgttccaaacgagtggcgcatccaaaataaagaagattactatttcttctcgctccgtcatgtcgatgcggagattacggaattcgccaacttgagtactcttctagaccatttttatatcggtaaagcgcgtcgtgatcgcgttcaccaattcgcgcatgatttggaaaaactattatctaatgaactggctcgcagtagactgaaaatcgaaaaactcgaaaatactttactcgaaacagaaaaagcagatgtttatcgtatccaaggcgaacttctaactgccaacctgcatttaatggaacgtgggatggaagaaattaccgtcgaaaacttttacgatgatatgaagaaaatgacgattccgcttgatactagaaaaacaccatccgccaatgcccaaagttactttagccgttaccaaaaactgcgtaatgccgtcgaagtagtgaaagagcaaatcgcactcacaaaagaagaaatcacttacctagaatctgtggaatcccaactagaaacgtccggcccgcaagatgtggaagaaatccgccaagaactcgctgaacaaggctatcttcgttacaaacagaaaaaaggcagccgtaaaaaagcgactttacctgctccagaaaaatatacttcttcgaccggcttaacgattttagtcggaaaaaataataaacaaaatgattatttaacgaataaattagctaggaataatgaatactggttccacgtgaaagatttgcctggttcgcatgtggtgattcaatcgaataatccagatgagacatcgattacagaagccgcaatgattgccgcctattattcgaaagcgcgcctttcagcaacagtccccgtcgacggcacgcttgtaaaacacgtgaaaaaaccaaatggtgccaagcctggttatgtcatttatgataaccaaacgacttatttcgttacacctgatgaaaagctcgttttagagttaaaaaattaacggttccttcgtggagccgttttttctttctaattttagggtagatgtgtactgactttacttttttattggaaggatgatagaggaatgaaaattttattaattggggcttctggtacacttggatctgcggtgaaagatcgtttggagaaaaaagccgaagtgattactgctggtagacatagtggtgatgtgacggtggatattacgagtattgatagtatcaaaaaaatgtacgaacaggtcggaaaagtagacgcgattgtttcagccactggaagcgccactttttctcctttaacagaattaactcctgagaaaaatgcggtaacaattagtagtaaattaggtggtcaaattaatttagttttactgggcattgactcattgaatgataaaggaagcttcacccttactactgggattatgatggaagatccaatcgtccaaggggcttctgctgcgatggcaaatggcgcggttacagctttcgcaaaatctgctgcgattgaaatgccgcgtggaattcggattaatacagtgagtccgaatgtattagaagaatcttgggacaaactagaatcatttttccaaggattcgttcccgttccagctgcaaaagtcgctcgtgcgtttgaaaaaagcgtctttggtgcacaaactggtgaaagttataaagtatattaatcgaaaaagaagctcacccgtaacaaaggtgagcttctttctatttaccccatttttctgggtttttcttccattcttttaatgtttccatatcttcaccagtcacgtaattttcatttaaagctacttcaattagctcatcgtagttcgttaatgttactagttttgtaccagattcttctagcaattgttttcctttagcaagtccatatgtaaagatggccgcgattccaactacttccgctccagcttcttccaacgcttccactgcttttaatgaacttccaccagtcgaaatcaaatcttcaattaccactactttttgccctttagaaattggtccttcaatttgattccctttgccgtgttctttagcttttgatcggacgtagaccattggtaagtctagtaaatcactcacccatgcagcatgtggaatccccgcagtcgcggtgcctgcaacaacatctatttcaccaaatgtttgcttgattttttcggctaatgacttggcgataaactgacggacttttggaaagcctagcgttaggcgattgtcgcagtatataggggatttaattccagatgcccaagtgaaaggctcatttggttttaaaaatacagctttaatttctaataattgctcagctacttgtttttcgatgctcatgcattccactcctttaaaacttgattatacgctgctaccgggtcgtttgcgcgcgtgatggaacgaccaacgacaatgtttgacgagccaatcaaacgtgctttttctggtgttacgacacgaatttgatcgtctgccgtgtcacttgccagtcggatgcctggtgttacacgtaaaaaatcagcgccattttgttgtttaatatcttctgcttctagcgcggagcaaacgacaccgtctaaaccagcttgtttcgataaattgctataatgcatgacggattcaagcagacttgtttttattaattgttccgtttgcatgtctgtctcacttgtacttgtcagttgtgttacggcgataatttttggacgtttgccacttggagaacctatttccagaccttccttggcagcttccatcattttcttcccaccagccgcgtgtacattaaccatatcaacgcctagttttgccaagccaatcatcgcacttttgacagtgttcgggatgtcatgcagttttaaatctaagaagatttcatgattttgttgctttattttttcaacaatgactggaccgttgctataaaaaagttccatgccaactttcacggatagcgtttctcctgaaaatttggctaaaaaggtctctacttcttcgtaagtctggaaatctagcgcgataattggtttattcattgatttgttcgctcctttttaagatcttgtagggaagaaataccgagtgcatccattcgctttggtaattcggaaattaatttcggacaaataaatggatcagtaaaattcatcgtgcctactgcgactgcatctgctccggcaattaagaattctagtacgtcatctactgtttgcacaccacccatgccaatgatagggatgttacttaccgcgcggacttggtgaatcatccggatagctacaggtttaatcgctggaccagaaagaccacctgttccatttgcgatgattggttttcttgtttttaaatcaatacgcatgccaagtaaggtgttaatcatcgtcagtccatctgcaccagccgcttcaattgcttgcgcgatggaaacaatatccgctacattcggtgatagttttacataaacagggacacttgcgacatttttcacggctttcgttaaacggtgcgcaacttccgggtctgttccgaatgcgatacccccgtgtttcacattggggcaggaaatattgagttcgattgctttcactgcttttgattccccaattcgggcgcagacttggacatagtcatcctccgttgcacccgccacattagcgataatcggcgtttcaaattgttctaaaaatgggagctcatgcgctaaaacatgttcaagacctggattttgtaagccaattgcattcagcattccgcttgcggtttccgctactcgcggagtgggattcccgagtctaggttctggcgtcacggctttggccataatcgctccaagttcatttaaatcatagtatttgctatattcttgtccgaagccaaaacatcctgatgctggcataatcggatttttgagcgataatccgggaatttctacagctaatcggttcataacttcacctcatccgcacgaaaaactggaccatcttcgcacactttaaattgcttgttcgtatcatccgcttttggacaaacacaagcgtaacaagcaccgatgccacaagccattcgttcttctaatgaaagatacgttttcgtttctggaaaactagctttcactgcttggagcatcgcttttggtccgcaactgtagatgacatctggttcttctgggaaatttttcgtaatatctgtgacgaaaccctgtgttccaagcgaaccatccactgtcgcaatatgcaccgtgccatactccgccatttcttgtgcataaaaactatctttcgccgattggaacccatttacaaacatgacttgtacgcctttttcagctaactctttgccgagctggtacatgggagggacaccgattccgccgccgattaaaagagcggtttttggcgcgggagtagtatcaatatcgaagccctttccaagcggacctaacacatcgatagtatccccttctgaaagtttactgaaatctcttgtcccatcaccctctacccggtacaacagaatgcatgtctttgcggttttatcgtaagaacaaatacttatcggtcgtctcataagtaaatcagaacgactcggtttcagcattaaaaactgtcccggcgacatgcctgctacacattcccctgttaaaattagttcgtatactttatctgcaatttcggtttgctgaatgactttcatttccgtctgtaacacggttccaccccgtttcttctatttatacacgtgatttcggttgttttacttcgctggcattcatcgattcgagttcaaaagagcgtgattcaagtacacgtaagattgcttctgctgtatcaagtgatgtacaaactggaatgccattttcgacagattcgcgacgaatttggaagccatcacgttctggacgtttacctgttgttaaggtgtttactacgagcgtaacttgtccatttcggatgtaatcaattaacgtttcttgattctcaccaatttttttcacttgtgacactggaatgcttgcttcttctaatgtgcttgccgttcctttggttgccataatggtaaagcctatgcgattaaatcgcttcgctagttctactgcttcttctttatcgcggtcagctacagttaaaagtacggttccatagtcatgcatcgttgtcccgctcgcaacaaaacctttatagagtgctttttcaagtgtcacatctttacccataacttcaccagttgatttcatttcaggtcctagcgatgtatcaacactacgcaatttcgcgaaagagaacactggcactttaacaaaaatttcttgtttttctggggcaagccctggcgtgtaaccaaggtcgattaaattctctcctaaaatcactcttgtcgccacattcgccatcggaatttccgttattttacttaaaaatggcgccgtccggcttgaacgcggatttacttcaataacaaaaacttcttcgccgtccacgacatattgaatgtttagcatcccgatgatgtttaatccagttgctaatctcgttgtataatcgacaatcgtgtttttcacttgaatgcttaaacgttgcgctggataaaccgcaatcgagtctcctgaatggacgccagcacgttcgatgtgctccataattcctggaattaagacgtttacaccatcactgattgcgtccacttctacttcttgcccacttacgtaacggtctactaaaactgggtgttttggatttacttttaccgcatttgtcatataatgttttaacgcctcttctgattccacaatttccattgcccggccgccaagtacgtaagatggacgtactagaaccggatagccaatgtctgtcgctactgtaattgcttcttctaccgatgtagctgttttaccagctggttgtgggatttgtaagatttctagcgctttttcaaaggcatcacggttttccgcgcggtcggtatcttctaaacttgtacctagaattttcacgccgcgttttgctagaccgtctgctaaattaatcgctgtttgtccgccaaattgcacgacaactcctaatggttgttcgatttcaatgacgtgcattacatcctctaatgtcaaaggctcaaagtaaagtttgtccgagatactaaagtcagtcgaaactgtttctggattattattaatgataattgcttcatagcccgcttgttgaatggcccacactgaatgcactgtcgcatagtcgaattccaccccttgcccaatccgaatcggtccagatccgagtacaatcacgctttcttttgctgatcgtgtagactcattttcctcttcatatgtgctgtaaaaatagggtgttgtcgattcaaattctgcggcacatgtatcaaccattttgtaaaccgggaaaagattttgcgcttttcttaagtcataaatcgcttgttcatcaacattccaacaagttgcaaggaaagcgtcagaaaaacctgcctgtttcgcttctgccaaaatttcttggttttgcggattttctttgatacgattttcaagttcgattgttttacttaatttatataagaagaataaatctattttagttttctcgtggagttgttcgattgtttgaccacggcgcaaagctgctgctaggaagaataaacgatcatcttctgggaagcaaatcttgcgttctaatgttgcttcgtcagcattttccgcttcttcaagcaacaaatggtcagcaccaatttctagggagcgaactgcttttagaagtgcttcttcccatgaacggccaattgccatgacttcaccagttgctttcatttgtgttccaaggcgacgatccgcttgctcaaatttgtcgaaagcaaagcgtgggattttcgcaacaacataatctagcgttggttcaaagtgggcgaaagttgttcctgttactggatttctcacttcatcaagtgttaagccaactgcgattttcgctgcaagtttggcaatcgggtagcctgtcgctttggaagctagcgcagaggaacgactcacacgtgggtttacttcaataacgtaatagttataactatctggatcgagtgccagctgaacgttacagccaccttcaatttctagtgcgcggataattttcaacgacacatctcgcaacaattggtattcgcggtcggaaagcgtttggcttggtgcgacaacaatcgaatcgcctgtatgtatgccgactgggtcaatattttccatgttacaaacaaccattgcgttattgttcgcatcacgcattacttcatattccacttctttaaaaccagcgatacttttttctagtaaacattgtgttactggactcagttttaaaccacttgtcaccgtttcaattaattcttgttcattgtggcaaatcccgccacccgagccaccaagcgtatatgctgggcgaacgataactgggtagccgatacgttcaacaaaagcataagcttcgtccaaattatgaataatgtcgctttctggcactggttctcctagctcattcatcaagtctcggaatgcttcacggtcttccgcttttttaatcgccgttaaatccgtcccaagtacttctacgttacattcatccaagattccagcagcagaaagttccattgccatattcaaccccgtttgtcccccaagcgttggtaaaatggcatccgggcgttcttttcgaataatgcgtgatacaaaatcgagggttattggctcaatgtaaactttatctgccatttctgcatctgtcataatcgtcgctggattcgagttcactaaaactacccggtacccttcttctttcaaactcaggcaagcttgtgttccagcataatcaaactctgccgcctgtccaataacaattgggccagaaccgattactagaattgtttttatatcgtcgcgtttaggcatgtagttcaccctcctctttcccattcatcatttccataaattcatcaaataagtagttgacgtcacttggccctgggtttgcttctgggtgatattgtactgtataggctggatattctttatgtgccagcccttctaccgtttcatcatttaattcaatgtgtgttacttttaaatctgttccaataagtgaatctttttctactgcgtaaccgtggttttgtgcagtgaaatcaacacgtccagtggctagttctttcaccggatgattcgcgccacgatgcccgaatttcagtttaaatgtatctgctccgttcgcaagtgcaaacaattggtgccctaagcaaattccgaatagtggcagtttgccttgaatgccgcgaatcatttctaatgcttctggaacatctttcgggtccccaggtccattggataacatcacgccatctgggtgcattgcaagaatttcttcggcggatgtgttgtaaggaacgaccgtcacatagcaattacgtttatttaattctcgcaaaatcgaacttttcacaccataatcgacaagtacaacccgtttaccatctcctgggcttgcaaatgctttagcggaggaaacttcgtgtacttgatcgaccggcaaacgaacagaacggaggtggtgtagcagttcctctttgtctgctgtttctgctgctaaaataccttttagtgtgccttctttacgaattagtttcgttaatttacgtgtatcaattcccgcgatacctggaatgcctttttctttcaaaaattcatttaatgtaatttggttgcgccagttggaagcgaattctgcagcttcacgtaccacaacccctttcacagcaggattaatagattcaaaatcatcacggtttaccccataatttccaacgagaggatacgtaaaagtaataatttgaccataataggaagggtctgtgatagtttcttggtagcctgtcattcccgtattgaagacaacctcaccaatggtttctttttcactaccaatcgcatcaccgataaaataattgccatcttctagcattaaaattcgctttgtcatttaatttccccctcattgtatacaagcgttccttctgcaaacgtggctactggccaaccaatacatgtttctccaacaaatggtgtgttttttccttttgaataaaaagtgtctgggtcaatattcgcttctttttctaaatcaagtacgactatatctgctacgctgccttcttctaatttcccgtatggcagtttaaagcattccgctggtttcacagtcatccagtcgattagctgttttaatgtccattcgttcgttttaacaaaatgtgtatatagtaatgggaatgctgtttctagacctacaattccgaaagcagcttgctccatcggtacatttttttcttccgctgcgtgtggagcatgatcagttgcgataaaatctatcgtaccatccagtaagccttctaaaagtgccgcccgatcttctttgctgcgaagtggggggttcattttccaattaccatcatttcctggaatagcttcttcatctaaaattaagtgatgtggtgaaacttcagcagtgacacgaattcccgcccgttttgcatctcgcacaacacgaacagattcttttgttgaaatatgacagacatgataatgacaacctgcagcttctgctagtaaaacgtcacgtgcgatttggacagattcagcaatatttggaatgcctttaagtccttctttttcagcaaaaatcccgtcatggacaactccaccgtatataagtgagttatcttcacagtgagccacaattgccatatctagtgctgccgctcgtttcatcgcttcatacattgttccagctaactgcactcctacaccatcatctgtgaaagcaaatgcgccagcttcttttaaagcttcaaaatctactaattcgtccgttccaaggctggtcgtaatcgaagcatatggtaacacgcgaactttcgctgtttctttaatttttgcttgtatactttccattacttctttagaatctggaacaggttttgtattcggcatcgaacaaattgtcgtatagccaccgcgtgcagcagctttcgttcctgtcaaaatggtttccttatgttccccgcctggctcacgaagatgtacatggacgtcgataaagcctggtgtaattagcttacctgtggcgtcaaattcctcaccacttgttacttcaattgaatcggcaatcaagttgactttgccgttttgaatgagtacatctttactttctagtttccctgacgcgtttagcacttgtccattttttaatacgtacataatttcgccctcatttcctgttcttttaaaatggcttccaaaatggccattcttataaaaacgccattcgtcatttgcgtaacaatgcgtgatttttcgctttctactaaactatcagcgatttccacatctcggttcacagggcttggatgcataatgattgcatcttcttttaacttctttgcccgatcttccgtcaatccaaatttttcgtggtagctttctttcgtaaactcatctgttccactatggcgctcatgttgtacacgcaaaagcatcattacatccactttttccacaatttcatcaactggtaagtatgtgccatatgctaagtaactttcgtcaaaccattctcttggtccagagaaaaacagttccgcgccaagtctttttaacactttcatattggaattggcaactcgactgtgccgaatatcaccagcaatcgctactttcaaaccctgaaaagtaccaaattgttcttttatcgtgaataagtcaagtagtgattgactagggtgttcaccgcatccatcaccgccgttcacaatagcaatgtctaatttttcgagtcccgcatagtaattttcttctgagtgtctaattactgcgacattgacccctacggcttgcatcgtgagcagtgtatcgtagagcgtttctccttttgtcatgctagagctcgctgcatcaaaagaaacaacctccacgcctaactttttctccgctacttcaaaactcgtatgtgttctcgtactcggttcaaaaaacatattgaccgcgaaagtctgttcattaaaagtcgcttttttcccgcgtttaaactgtgccgcctgctctaataaatgctcgatttcatggacggttaatgcttccattgacaacaaatttttcatttaaagcgccaccttttctacttcattttatagaaaaacctctgtaaattttttgtctgcagaggttttttgtcatgtgttatgctgatctgtgctcggctggtaatactaagtttaagataatcccaactattgctgccattgccatacccggaagttcaaatgtaccagatttaatagtaagtccgccaattccgactactagcacaaccgaagcaataatcatattacgattaacacttagatcaattttattttcaatcatcattcgaagtccgcttgttgcaataaccccaaagagtagcagggaaatgccgcctagaactgctgtaggaaccgaggtgataactgcattaatgtagccgataaatccaaagaggatagcgaaaactgcggctcctccgataacaaacacgctgtatacttttgtaattgccagaactccaatgttttcaccgtaagtcgttacaggtggtccgccgatgaacgatgcgataatcgaagccgtaccatccgcaagcaaggaacgatgaagtcctgggtctttaaagaagtttttattcgtaattcgattcagcaataattgatgccccatatgttccgccatcgtgacaaacgcaagtggcgccatacttagaatgaccgtcacggtaattactgggtcgatattaacaaatggaatgctgaaatctggaatttggaagaaagacgcatttttgattaacgtgtaatctaccataccgaaagccatacttgttaagtaacctactgtgaagccaaacaaaatcggaatcaagcccataaatcctttgaaaaacatcattgcgattatggttgccaggagcgtaattactgccactgccaaagtttctaaactgtatttaccattgttcgttcccattgccatcgctgctgcacttggagcaagtgacaaaccgataaccatgattactggtccaacaacaattggtggtaaaaccttttgaatccagtcaacacctgcgtagtaaacaatcagagaaacaatcgcatatactacaccgacggagaaagttccgaccataactgcgcccggacctccgccagatttggctgcaagtaatgctgtaattggtgcaataaaggtaaaggaagaacctagatatgcgggtatttttccgcgagtaattccaagataagcaagtgtcccgagcccgctagatacaagcgccactcctggacttaaccctgtcacacttggcacaaagatagtagagccaaacatggtgaaaaggtgctggatgctaagaataatccatttattgaagcttggtctttcgtgtatatctagtactggttttgtcactgtttctgtcgtttctgtcattttcttccctctttcttcataaaaaataccccttgtctgtgtcgacaaagagtatagaataatcccctatagaaattaatcactctttgtcagcctcacaggactgcttttaaaaaagtgttacattgttattcatttttgttaataataactgcatcttctgcatgatccacatctgttaagcgaacttctactcgctcgttccctgaggttggaatgtttttccctacgtagtctgctctgattggaagctctctatgaccccgatcagcaagcactgcaaggtgaatttgcgcaggtctacctacatccattaatgcgtccattgcggcacgcacagttcgacctgtataaagcacatcatctacaagaacgaccttctttccattaatatcaaatggaatgttcgtcccatgtacagcgggttcgcgagttttatcatctttgaaagacaaatcatcgcgataaagtgtaatgtcaatatccccaactggcacatcaataccctcaatttcaagtatccgcttatgcaagcgctcggcaagatagataccacgcgtcttaataccgacaagcgctaaattctttgtgcctttattccgctcgatgatttcgtaacttactcgagtgagcgcacgtttgattgccgcctcgtccatgacaactacttgtttttgcatccgaaatctctccttttgtgcaaaaaaataaccctctgccagtgtaagcaagggaacgcgtacgagcatacaattaacccgtcaaattatcgtcaccttcttagcctctctggactatgttaaaggactttatttcattagacttatcttaactgatagaactctccttgtcaatcaaaaaaagaaaaacatgttatactattaataataaaataaaggaggccaaacatatggctatatctaaagcaaaaaagaaacgtcaaaagctcatacgcgaaggtcatttgaatcctgaaatcaagcgtagcccctttgcactcatcgatttaagttccaaacaaacgaaaacaaaaaaaggatatctttatagcaagaagcgaaagaatcaccaaaaagatgattctttttttgtgtatttttttaagttttcacattttctacatattaacagcttgaaatagtttccttttaccagaaattagtccaatttgactgctctatgtgctatgctgaaatagctaaaaacatggacttaagaggtgaatacaatgggcataatgaatagcttattaaagcagaaagaaatggtcgtgaaagattggctaacatattatgtatctgtggatgatccatatattttcacattaaaaaatgatcatcgtttaatggatgaaacgggctttgttttagaaaatttgtttattggaatgactgaagatttaggaaaaatgaatgctttcgcgcgtgagctagggaaagctcagtttataacttcactcggaatttctcgtattttattccatattcgcttattggaagagtttttgctcgattatgcatcagaaatcaaaacaaaatctgctaattatcgtgaattatatttatttagcatcaagcttcatcaggtatttagtagttttacacaaaacttaatcgaaggatacacccatgcaaacgaacaaatgattgtgcaaaaagaaaatcaaattattaaagaatcaaccaaactgatttggattgccgaaaatgtttttcttttacctttaattggaaaaattaccgatgagcgagcaaaacagattactgaaacagcactttttgaagtttgtgagcaaccggtgaactatttaattattgatttatctggtgtgcaattagagtctcctaacatcggtaagtacattgagtatttcttctcatcgcttaaattagttggcgtcactccaattattacaggtatgcaacctcaaactgccaaagtgatggttcaagctaatctaactgaacaacacggtattaaaacatttgcaaccttacgccaagcaacaaaaacacttatgaaagaaaaagaagcaagaaacgcccataaatagggtgttcttgcttctttttttaatattcttcttgacgtaatgattttaaagctttttcaaatgaacttggtagtggcgcttcaaatgtcattcgttcattcgttgtcggatgatcaaatcctaattttgcggcatggagaaattggccattgcccttgattgtgtttttaggtccgtatttcggatctcctgctaaaggatgaccgatatatttcaaatgaactcggatttggtgcgtacgtccagtgtctagtttgcaattaattaatgtgtaacctggtaggcgctctaatacttcaaaatgcgttctcgcttctttcccatcgcgtacgactgccattttttgacgatcttctttggcacggccgattggcgcttcgattgttcctttttggtggacaatatcaccgtggacaagtgcgatatattctctatccgaagttttgtcttttaattgtttggctagtgattcatgggcgtggtcatttttggcaaccattaataagccagatgtatctttatcaattcggtgaacaatacctggacgaattttaccgttaattccagataaatcatcacaatggaatagtaaagcattcacgagcgttccacttgcatgtcccgcagatggatgaacaaccattccttcaggcttatttacaacaagcatatctttatcttcaaaatatatatctagtggaatatcttctgctaaaacttctagttcttctggttcacgcacttcgtaatgaatttcatcgccaacttgtactttgtaatttggcttcgcaagttctccattaaccgtaatatcaccgtttttcagcatgagttgtattgctgaacgactttttcccatcatttcagcaatcactttgtccacacgttcgcgcgcgtggctttcttctataatcaatgtttcattctgcattatttaattcctttcgttttgcggtcgtctacaaaaacatacacgagcattagtacgacaccaactgaaagcgaggcatctgccacattaaagattgggaagtaataatttccccatactgtttgtacaaaatctactacttcttgatgcaagacccggtcgataaaattaccaatcgcaccacctagaataaacgctaaactaatggaaaatagtcgctttcctttggcatatttttgcataatataaattataattccaataacaacaacagtaataagatagaaaaaccacatatgcccttctaaaatactccaagccgctccgtcattacggtagcttgtccagtataagaaaccaggaataacttctattttctgtccaatttccatattttgaacaacaatccatttagtcaattgatctagcgcaatcactgctaaggtgattagataataatacattttccgaaccctcttttcacatcagttagataaaaagtacgcgctcttctgtaaaaataagaagagcgcattccttctttgttattgtatgataaattgaagcaaaaataaagctgcaattacatacatgactggtgaagtacgttcctcgtttttcgtgaaagcacgaagaatgggatacgcgataaaaccagccgcaattccgtctgcaatactatacgtcagcgggattaatacaataatcagtagtgctgaaaaagtttctgccgcattcgataaatccatttctttaaattcttgcagcatcgacatgccgataataattaaaatcggcgcaatagcactgttcggaataaaagataatactggcattaagaaaagggatgcgataaagaacaggccagtcgttattgttgctaaaccagtttttgctccactcgcaaacatcgagccactttcaagtgcagatatcgttggacttgtaccaaataagccagataaaaaggctgtcagtgagctagcttttaaaatccgtggtaatttttccgtttgcttgagctgtcttacttgtccatttgtaagtccaaccgtttcaaacacaatcaccatcgtcattgtaaagacagcgctccagaaaccaacactcgctattccggaaaaatcagctttaaagagcacatcactccacggcgcaacgcttatcgaagcacctccagctttcccggcaacaccaaacatcacaccaacgattgttccgattattaaactccataagaaagcgcctggaattttccgaataactaaaatcatcgttaataaaagtgtcacgagtgttgctaaaacgaatggatcacctaaatctccaacagcaataatggcatgttttccgcgcgttacgattccgcctttctcaagccctaggaagattaagaataaacctaacccaaccgtaatcgcttgttttaaaatcagcggaatagcttcatttagttttcctgcaagtggtgtaaacgcaagaatcataaatagtaagccactcatcgtgacagcagcgagtgcaacctgccaacttagtcccattccttgaacaagggtatacgcaaagagcgcattaatccccatcccaggcattagaataagtggtgcatttgcccaaaatcccataatcaaacaaccaaacgccgaaataaaaatcgtcgcaaggactgctccttgataaggaactccagcctccgctaaaatcgagctattgacgacaataatatatgccaccgtaaaaaagccaatcataccagccaaaaattcggtccggatattggttttatgctcgttcagccgaaatactttgttgaaaaatttctgcatactttttcctcattatgaaattgtccctctcccaacccgcagagtattgcccctgccacagaactttattataacaaagatagtacatatacgaaaggaaaagttttttgttacgccgccagttcgccttatttgtgctataatctgaatggatggaaaaaggagatgattacttgcaacaaacagtcacatatggggcaaaatggaaacaatttctaacgattttcacaccgatagtcattacgcaactcacgcttttctcgatgacgtttttcgatacgacgatgagtggtaattattcgaatcaagcactggctggtgtagcgattggtagctcgttttgggctccggtgaatgctgctttttctgggttactgatggctattacgccaatcatcgcccaattaatcggtgcaaagaaagaaaaacaagtcaaaaacacggtgcataacggcctatatattgctttatttttagcatttattttaattcttattaattttttggtcgttccaatgattttgacacacatgccagttacggcagaagtcgcggatatcgcccgtcatttcttgaacggcatttgtatcgggattcccgcgttctttatttccgcgattctgcgttcttttattgattcgcttggtctgactcgggtgacgatgctgattacgctttgtaccgtgccatttaatatctttttaaattactgctttatttttgggaacttcggctttccagaaatgggtggtgctggtagtggttacgcgactgggattacgtattggctcgttgttttagttagtgtgattttgattcaaacacaaactagattgcgaaaatttggtgttttcaaagggcttacggcactgcgtttttccaagataaaagagatcatcggcattggcgttccaaatggtttgacaattttatttgaaacgagtattttctcagcggtaaccattttaatgggggcctttgggacggagacaattgcggcacaccaatccgcaaatagcgtctgcacactgctctatgctttcccgcttagtgtcgcttccacgctaaccattcttggtggttacgaaaccggcgcgaaacgcttaaaagatgccaaacagtatcgacatattggtatggctgcggcaattttaattggctgtgttaatggcgcaatcctatttttcttccgcgatattattgctggtttttatacgaacgatcccgctttgagcaatttaatcatgcatttcttagtttatgcgatattatttcaatttgcggatgccgtcctgtcgccagttcttggggcgcttagaggatataaagatgtcacagtcacctcgattgttgcctttatctcttattggttgattgggcttccagtaggctacggtttatcgtttacgaatcttggcccattcggttactggattggtttaagtactggcctatttgtcgccgcatttattttatccatccgggttcgtaaaacggagcaaaaactttctttcaacacaaaagacgcagagatttcgaattaatctctgcgtctttttttatttggctaaaccatcatggattttatctaaattgtaccgcatcatttctaaatacgtgtcgcccacttcgcctttttttgcagtggagtccgtgaagattttcgcgaaaattggtactcctgtttctttagatacactttccatactacgtggatctacgcttgtttcgacaaatagattaggcactttttctttttccacgataccgacaatttgtttcatttggtctggagtaccttggctttctgtatttatctcccaaatatatgctgcttttaatccgtagcgagctgcaaaatatttaaaggcgccttcgctagttactaatgttttttgattttctggcaaatctgcaaatttttgttttgcttctttatccagagtagctaatttgtcgatatattttttcgcattctctttataaaaatccgcattgtctggatccgcttttacaagtgcatcacgcacattttcggtatagataattccgttatgaagatcaagccatgcatgtggatctgtttcagatgtcttgcctttttccgttaagtatttgggttttacacctttacttaactccaccacttgattcttgtcttctcttgatttatccgccgtttctaacatacgatcaaaccaaccgttccctgtttctaaattcaatccattgtaaaaaattaaatcagcatccgcagcactttgaatgttggctggtaagggatcatattcatgcggatccacgccaacaggtacaatactatgaagttcaattttgttcccgcctacattttttacaatatctgctaatatcgaataggttgctaccacatttaatttgccgtctgtttttttcgaatcgctattttgactggaacaccccgcaagcacaactactaatgcgaaaagggatacaactattatttttttcattcgataacctccctttttttagaaaatagcaagccttgtttcggtgcgaataaaaaggcaataaagaaaataattgtcgcaactaaaaccatagccgcaccagatgctaagttgaaaatgtaactaaagtaaagtccgataatcgcactcactgctccaaaagtagaagcaagaacaatcattttggataatttattcgtaagcagataagctgttgcagctggcgtaattaacatcgccacaactaaaataattccaaccgtttgcaaagcggaaaccgttacaagtgttaaaagtaacatcaagaagtaatgcaagaatttcacattgagaccatatgcttctgccatcactggatcaaacgaactaactagaaactctttgtaaaatagggctactaatgaaatcacgataatggcaataataattgtcatccacatatccgaactccgcaccgcaagcacatttccaaataaaatatgatacaaatccgtactacttttcgcaaaggatattaaaataattccaagtgcaaaaaatgcactaaaaacaattccaatcgctgtatcattttttatccgacttttttgattaacaaaaccgattccaagtgccgccgcgatgccgaatgtagctgcaccaataaagaagttcatccccatcatataagaaatcgccactcctggaagcactgcatgagaaatcgcatcccccataagcgacatacctcgtaaaataataaaactaccaataacacctgaaacaataccaaccgtcacagaagtaataagggctttttgtaaaaaactatattgcattaaaccttctaaaaacaacaactcttacacccccgctgcaaatgctaccggcgcgtcaccgtaagcaaattgaattttttcttctgtaaatgtttgctccactggaccgtgcgcgactaatttcttattgagtaaaatgatatcgtcgaagtaagcagccactttatgaaaatcatgatggaccacgacaatcgttttcccattatctcttagcttttttaacagtcgcataatcagcgcttcactcgtcatatcaatacctgcaaatggctcatctaaaaagaaaatttccgcatgttgggcaagtgcgcgtgcgataaaaacacgttgcaattgaccaccggatagctctcctatttgtcttttcataaagcctgtcatttccacttgctctaacgcatctagcgcgagttgcttttctttttttccaggacgcttaattaatccgagcgctggatatgtgcccagcaaaaccatatcaaaaacggtaattgggaaagttaaatctacttcactccgttgcggcacatatgcgattttctttctccaataagtaagtggtttgtctgctaaagtgacttgaccttgttcacgcggaattaatcccatcattccttttaataaggttgatttacctgccccatttggaccgacaataccagttagttttcctgatgctatttgaagtgtgacattatcaattgccaccttttgtttatacgctattgttaaaccttgaatttccatctaaaccacccttttcccacaagactaaattttacacgtaactaaaaatgtttccttagagcaactttagttcaaagtataacggagaatctttttcttgtaaagtaaaatgttcaaaaaaatcccgtagtcgattaaactacaggattttcactattattatttaattgatccgtctgctaattttttgagcagtttgcggaactctgcttgttcatactcagaaaaaacggcaaaacgttttacaatcatttcttttttctttttatcaatttctttgacaaattcctcggcgtttggggttaatttcagttcaataattcggcggtctacttccgaacgatgtcgtgtaataagctcttcttcgactaaagtatccgtaatggctgtgatgtgactggctgaaacatcaagcgttttagctaattccgatgttttcgtaagtccacttgaaatcaagctcaagacccgatactcgctaccacttaaccttttgtcgagtactgcctctacttcatgacgaaaactattaaaaattcgcttaatcaatgtttcaatttctaagtatgtttccatttttgctacctccagtttttcaaaaaagttgtacgtttacttcaccaaggcttttgctttttgtagttgtggatctgtttcttttagatgtttttgtgttaattcgactaatttatcagttgttacacctgtcatgattcctgtcacatctaatttgtttgctgtttggaatctttgaacagcgtattctgtgtctgtatcgtataagccatctacttttccaacattgtaatctagtgcttttagcaaagtttcaatggttttaacatcatcaccgaaatcgccatttttgtagactttggtggaggaagggatagtcatagttgcataatctggcatgttcacaaccacatctggcgtaatacctttttcatgaatccattcgctattaggtgttaaccattttgcgacagttaatttaagagtagagtcatcagataaagttgttgccgtttggaccgtacctttaccaaatgatttcgtaccgacaagtttaatgccaccagattcttttgcagcagcagcaagaatttctgaagcactcgcactcccaccatcaattaacatagtagttggtacttttactttataatcaccatgtgagctactatcagctttaatggccgatttatcaccatctttgtcctgctcttgtacaacaattttgccatcgggaacaaagaggctagaaatagaaactgcttgatcaagtaacccaccaggatttcctcgcaagtcaagaacaaggcccttcatgccatctttttcaagggatttcaatgccttttcaagctcatcataggttgtttctgaaaatgtactaatggttacgtgcgcaattttgtcactgcccatttctttgtacaccgtttcgattggaatttcatcacgagtaatcgtgacatcaaatggtttatcttcgttggaacgttgaattgtcagagttactttggtgcctttttcaccacggattttttgtgttgcttctgttgctgtgtcgcccttaacagacttcccatctacttgcgtaataatatcttgtggccgcaaaccagctttttcggccggagagtttttgattggcgaaacaattacgatagccccatctttttcttgaatctcagcgccaataccttcaaaactagcagaaatagtatcgttaaactctgaagattcttttttcgacataaatgtggaataaggatcatctaatgaattcaccataccacttattgccccatctatcatcgtagtagaatttgtgtctttataatatttacttgtaatttcgtcgtatacatcgtagagctttgtaaattcttttcgttctggaatgctcacttttacttgcttgtcatcccctaaagacattacgattgtagtcactaatgccgtcacaaatacaaaagcgaataatagcattataaatgggaataacttcatttttatataaccattgccgggttttgatttttgttcttcgtctttctccactttatttggttcgttttgtggggattcttccatctttcttcaccactttctatgtaaaatgtggctagtagtagcacattttatttaactcatttattttaccagttttccattcattttggtatctttttttcatgatataaaaaaaaggaggattcttgacagaatccccttttcgcttttaaattaagctacttcataacctgcttcttccacagcatcaattagtgcatcttccattacttgtcctttttcaaactcgacagtagctgttccttcatcaagtgacactactgcacttttcacaccattaacttctgataaagctttcgttactcgagcctcacagtgagaacaagtcataccttctacatttaacgttaatttttccatgttatattcctcctatgatttaaatttatatctttttaagcgaagtgcgtttgtgacaacagagacggaactaaatgccatcgcaagtcctgctacccatggggcaagtaagcctaacgcagcaattggaatacccgcacaattataagcaagtgcccagaaaaagttttgacggatatttcgcatggttgctttggaaagttctattgtttctggaatgagcgttaaacggtgacttacaagtgttacatcccctgtttcaatcgcaatgtctgttccagttccaatactaataccaatatcacttgctgcaagagccggagcatcattaataccatcaccaacgaatgcaacaatatgaccgtcttgttgcagtttctcgactaatgcactcttatcgttcggtagttgttcggcaaagaacatatctatgcctaaatctttggccatattttctacgacaacagattgatcaccagaacaaatcgctgttttaataccttgagcttttagtttttggattgcttcttttgcttcaggtcgtggtgtatcggataaagctagagcacctgcataaacgccatcaattgccattgctacgacagtttttcctgcatgcatccaactttcgattaattcatcgtcttcttttgggattgttgtaagggaagaaacatagcggtaagcacccagttctaccttactatcatccaaattaccagtcatcccatgccctgctttcgcgcggatttttccttgtttaattgcggatacatccatattctcaggctctaacatcttaataatcgctttagcaatcggatgttctgattgttgttccattaagaataaataagggaaaaactgatcattggctgcttttttatcactcacttccagtttaccttctgttaaagtaccagttttatcaaaaacgatagtatctactttggaagtacgttctaaatgttcgccacctttaaataatatcccactttcggcgcctttaccagttccagccatgatagcagttggagttgcaagaccaagtgcacagggacaggcgataactaataccgcaatagccgcttctagtgaaccatctactgttccagtcacaagataccaaataataaatgttacagcagcaataccaagtacaattggtacaaatatgccggaaattctatctgctaaacgttgaattggtgctttaataccttgcgcttcctcgaccaaacgaataatggattctaaaactgtttcttccattcgtttcgtaatttttgcttggaaagccccgtcaaagttaatcgttgcgccgatgacagaatcacctggtttcttctctacaggcacaggttcaccagtaatcatggcttcatcaatactcgtttcaccagaaataatttctgcatccatcggaactttttcacccggacgaacaaggataacgtcgccaattttcaacgaatctactggtactaaccattcttttccttcgcgaataacggtcgcttcttttgcttgtagttcaagtaaaccagcaatagattccgttgttctggaagttgcgtatgattcaagcagtttacctaataagattaatgtgattagcacggcacttgtttcaaagtagtaatgtggcatcacgcttgggtcaattatatggcggacatactctaccacactatagaagtatgcagcagatgtcccaagtgcgactaatacatccatattcgcacttttacctcgcagcgctttataagccccatcgtaaaaccgccaaccaatataaaactgaacaatagttgcaagaactaattgaatcgttggattaatccagttacctatcgtttccgcaaacgccatttcatggatatacggaatatgtgtcaccatggtaagaagtaatggcaaggaaagaagcgccgaaagaataaaacgtctcacttcttttttgaaattcttttctaatacagcatctttttcttctttggacattttttccgcagcgtcataacccgcatgtttaacaactttaattagatcttctgtcgatgtaacttccgggtcgtaataaacagcagcgttttccgttactaagttgacattcgctttttctacaccatctgctttatttaacgatttttcaattctcgtggaacaggccgcacaagtcattccaaaaacgtttaaatcttgtcttacatatttatcactcattgtatatacccccctcaggttttcgaaaattgacgtattgctttaagtaaatcctccattacgtcatcttccccattttttgctgcatctacaacacagtgtgctgtatgatgttctagtacttgtaaaccaacatttttgagtgctttattagctgctgaaatttgaactaaaatgtctgtacaatatctatcatcctcgaccatttgagcaataccgcggatttggccttcgatacgtcgcaaacgattttgaagtaatttcgtttcatcttctttgcgtggaacaattggttggtcgtgtttcattttttctcctcctttgtttctacaattaacagtataccccctataggtattttatgcaaccatttaatttctgagaacaaaaaaagccataaacaaatgcttgtttatggctcaaaatcttgttattttgcggcatctactttcttttgaagtgccttaacatgttcaaaaaattcttctaaagtccagttgttttcgtaaataatcgttgccgcatctttaccaacataacgataatgccaagattcatattggtacttcgtgatagcttctcgccctttcatataacgcaagataaaaccataattgtgggcattttcttgcaaccatttgccttcaggagttgttccgaatgcttctgtcagttcatatgattggttttctgaggagatatccatcgctaaaccagtttgatgttcgctagtccctggatacgctactgcttctctcgctttttggtcccctttagcatttacttcagcttggaatacttcttgttggcgtttgtacgatcgataacccgatacggcgaatagtttcttaccatctttgttcgcagctacgaacatttcttctaatgcagttgctgcttcttttcttaattgtgctttttcgacttgttggctgccaaaagagaatgttacattcggacgaaccaagtcagggggggtatatgttggttgcaatgaataatctttgttagctaaaaccaacatgttttcctcattttcaatatactttataccatttttttcagttaatttattttgtttatcaatatatggataaagtgggtctttttctaattccgcaagtgtttgattgcctgacgatttttgttccactttagcgattgaatcagcatttgtgccaccaaaatattgatcttccactgtgtggacacaactgatgctaacagctaaagcaattgttaataaagaactcatatctgtttatcaaccttcctgtatacattaagtctgattctaagttagtaattaaaattattttattgcagcttcaagtgctacaacaatcatatcattaaaagtggtttgacgctcttcagcagatgtttcttcccccgtaaaaatatgatcactcacagttaagattgccaaagcgcgacggccatatttttgcgctaatgtataaagtgccgctgcttccatttcgatcccgagtacaccataatcagctaattgttgtttgtccagctgatcattataaaaacggtccgcagaaaaaacattccctactttaagagataatcctttttcgataccagcgtcataggctttttttagaagagaaaaatctgctactggcgcaaaatccactcctgcaaaagtattgcgattaatttgcgaatccgttgaagccgcttgtgcaatgacaacatcacgtacttttacgtccgcttgaattccacccatagtaccaacacgaatcaaatttttcacatcatagctttggattaattcatttacataaatcgaaatagatggaatacccatccctgttcccataacagaaactttttcgcccttatatgtaccagtaaatcctagcattcctcgcacttggttgaataaaacgacatcttccaaaaatgtttccgcaatgtattttgctcttaacggatcccctggtaataaaatcgtttctgcaatttcgccttgtttcgcttcgatatgtacgctcatcttttttcctcctagtgtttgtttttctcttcatctagcaaataagcatcccaaagttcatcgaaaatagacattcccggtaaatacggcgcattaaactccagatagtcacaaagaatatggtaatttctcgtttgctttggaaaactatgatctcggtatgcattgttggcaaattccgttttctgatctgttagcttcgggtcccgatatgtcattaaaaaatgataaaatgatcttcccaacgtacaacacactccgctctttttatgctttaactatagttgatttcttgaaaaaaataaagttaattttcgattttacgtagaatttcttctgcaagtcgatgtgtctctagagcatcttctttggaaattggtgctttctccccatttcgcacggccgttaagaaggcttggatgatagatacaaaacctcttttgtaaagcgtcgtttcccaatctccaaaacgctcaaaccgttctgttgtcccttcataaatatgcgtttccgtaacattttctacttcatatttggcgctcggggtcatcactgctaatcgttcttcgttcacgccgctatctcggttcataatcgccgttgccactttacctcccgctgtaatttgtaccgttatacttgctagaagattctcttgccataccggaacgacatgtaactgttctattttggcatctagtaaaaaacgcacggtatcaatgacatgaataaaatcgtcataaataaatgtacgagcctcacccggttgcgccgcgcgatttttttgcataataatcatgttggtatctgttaaggcttttaattcttgatattttggcgcgtaacggcgattaaagccagtcataagtaacgtattttgttcttcagctaggcgtgttaattcttctacttcggctaaattgtcggcaattggtttatccacataaactggaatatgatttgctagaaaagtccggattacttctgggtggcttgctgtagatgaatgaacaaacgctgcattcacgccagactcaatcatagaatgaatactttgatgataatgatcaaaacgatatttctcacttaagtgctttaatttctgcgcatccctcgtgtaaagatgtacctcgatattttccatttcagcaaaaactggcaaatatgctttttgtgcaatgccgccaagccctactaccgctatttttaacatgtgtatcgctccttatcacaacaatgccagagaatgatttcgcgatattattctacgcatttcattttctggcatcatgtgtttattcaaagattttcttatatgcttggtagccttcttcttctaacttatccacaggtatgaatctgagcgctgcggagttaatgcagtagcgaagtccacctttatcttgtggtccatctggaaaaacatgccctaaatgggaatcagcatcagcagatttcacttccgtccgaatcataccatgggtcaaatctcgatgttcgataacttctgcttcgtcaattggcttagtaaagctcggccaaccacagccagcatcgtactggtcattggatgaaaaaagtggctttcctgaaacgatatctacataaatgccctttacttcattgtcataaaattcattttgaaatgggcgttcggtacccgctttttgggtcacattatattgtatatctgttagttgttgaaggcgctcgttctttttactttcatccatttgatttcaccctttccagttggcatctatgaatgcagcacgacctgaagcaacttgatatccctcatagtgcgctttttctttcttgtaaaaatcttgatgatattcttcagcaggataaaatgtttctgctttggcaatttctgtgacaatcggctttttaaatctaccactcgcatcaagggctgcttttgatttttcagcaatttctttttgctcttcattgtggtaaaaaataactggacgatacgaatcgccgcggtcaacaaattggcctgccgcatcagtcggatcagtttgttgccaatatacttcgactaatttttcatatggaaaaaccgccggatcaaatgtgatttggattgcttctgtatgtcctgttgtcccgctgcaaacttctttataggttggattaaccgtatgaccacctgtataacctgaaacaactttttcaattcctggttgcgtgtcaaaaggttttaccatacaccaaaagcatcctccagcaaatgttgctttttcaagtgattcttttgtcataaaaatgccccctaactaggattcagccagccaaattacttaactggtactaaaagtgtaaacgaaatatcgtctttcttcaaatttagcgtatcagcacgaacttttgtgtcgccttggagttttagtttatctagggaaagatagattttttcctttttaggcataattgtcacccaatcagggaatttatagtttttgcttacataattcattacgtaagacacgggcagtggcaaagcgccaactgacatgtctttgagcgtcaattcaacattgccattatctacaacttccggtgagaatttcaagcgtagttcgactggttcaccaaaaatttcagcttcggcagtaaaattaacattatttgcgacgaaaactttataaccgatatcttgatctttgctaaaatcttctatataagaactaatcaattgatttaagtcagctttcgttgtgctcgtttgaaattcaaccattgatttattgctaataagggatggcgtgggttcatcttgcgggctgagtttgaatactgctacataaatccagccagcagaaattagaagtacactaattaatgtgatacatacccatttccaataattacgttttggtttttttggagccgatcgtgtttctctctgcacgattttaacacctttctatttgggaatattgccttcgtttaattgttttacgatggctttgtctaattccgatgtcatcttctcatatcctttatgattaggatggaaataatcatctgacagcagcgaattaggtttatctttattatctgcatttcgatcttctaaaacttttgcgataggtacaaaataagcattgctatcttgctggatagttttcttggaagctttattccaatcagagataatctcgtcaaattgtttgatatcgctgaaataagttgtatatggattgtaaatacccattaaaaatatcgcggcatctttgttataggaacgaatgtcttttagaagtgtctctaactcttgttggaattctttgtttgcttttgtaaaatcatctacatttacatttaacagacgcgattgcaaaatagccatgacatcatttccgccaatggtgattgttattacattcgcatttttgacatcttcttggaagtctttgtttgtttttaaacgtttttcgagttgggttattttgtttccagataccccgtaattactcgtttttacacttgggacatttggttcttcttctagtttttttggaataatacctacataaccaccatctttgttttcatcaccgacgccttctgttaatgaatcacccatggcaacgaggttaatcggaatttcttttgattctttataatacttgataccaaaaactgcgccaacaagaagcgcgataacaagcacgctccctgtaagccacagccattttttctttgtcatatgcaatcactcgcttagtcagtatagtacataaatgcaaacgcaccagttccagcatgcgtagagataactgggtctgcaaaaaatagtggaatttctgttaaaccggttatttcttttgattcagcgatgaaatcatccgccaaattaagtccatttgcatgaacaacatctagatgctgaatttttttcggttcatctttaattagatttaggcaatattgtaatacttttttgttgctgcggactttggtttcttcttccaattgtccgtctgttaatttggcaattaatttgatatttaaaaggctacctaagaagccttgcatccggccaacacgtccacctttaattaagttatcgagtgttacgacaacgatataaagttttgttttgtcacgaatatcattaatttttgcgtgaatttcctctacagaataatcacccgattgagccatttcagcagcttttagtacttggaatgcttgcccacgagctgtataatcgcagtctacaaccgtaatatttccttctaccatatcagctgcttggcgagccgcattgacagtaccacttagtttttcagttaagtggatagaaagaatttcgtagccttctgccgtatatttttcgtatgcttctacaaaagaaccaatagcaggttgagaagattttggtaattcttttgtttcagccattcgcaccataaattcttctggtgtaatgtctgttttagggttgtatacttttccatcaatctctacagttaaatacaaaacgtcaatattccattttgctgcttcttctaatgttagtccagcagttgaatctgtgataatttttatttttctcatatagccacatccagttttgcttattttatcttattataacattcccggcagtatacacaacctataaactagttttaagaaaagagaaagaaatggtatttgtctttctattctggattttttagcgtatgatagatatacaatacacttaaaaatttgtagaaaagtatggtgataaaatgaatgtcacttcttacaattggaaagaagaagtagccaatgctataacgcatggtattgggtttattcttagtattcccgcgctcgtcttacttataatattcgccgccggaaaagataatcctctctatttaacaagttttttaatttatggaatttccctcatgttgctttatatttgttccaccctgcttcatagttttaaaccttgcaaggcgcggacgatttttaacattatggaccacgctgcgatttatgtattaattgctggcagttatacgccatttgttttgattacaattcaagggacactcggctggacgctatttggtgtcatatggggcctcgcaattgctgggataatttataagatatttatgaccggcaaattaaaacttttgtcgacaagtgtctacttacttatgggatggatggttatgtttgccattaaaccgctttatgccgggcttactccaactggattttggttacttgcaactggcggaattatgtttactgtaggtgccgttttttacagtattcctcgcgtcccgtacatgcacgcgatttggcatttatttgttatcgcgggaaccgcttttatgtatttctgtattttattttatgtttaaataacgcacttaaaaaaaccttctcccgttggagaagttttttttatatagtatgtcacaattgagacttgtttttaattatgtcatactatataatgattagcataacataataaaaggatgtgattcccatcgaactttctcctagacaacatcaaattgttgcctatgttcgcgcgaatgagcctgctactggtgactctatcgctgctcatttgaaattaacacgtgccaccattcgagctgacttgtcaattttaaccatgactggcattttagatgctcgtccaaaagttggttacttttactctggcttagaaactaatccgattcactttgatgaaattcggcagttgaaagttgctgacattatgacccaaccatttttcgcaaaaaaagaaacaagcgtttatgatgccatcgttatgctctttatggaagatattggtagtttatacgtcattaatgaagagcttttagttggacttgtctccagaaaagatttactaaaaggtgcgcttgctgatgcggacacgaaagcgactcccattgcgacaattatgacacggatgcccaacctcgttactgttacgaaaaacgacactgtgttacatgccgcggaacaactcgttttccaccaaattgattcacttcccgttctagaaaacgcaaaagtcgtcggaaaaatttcaaaaactcgcattactgcattatttgtagatacgataaaaaaggtttaataggaggagaatatggaaaatccggttattatatacgttatttcagatgctatcggagaaactgctcaacatattattcgcgcggtaacagctcagttttcacttaataagcctgcggacattcggcgccacgcttttattcgcgatgagagcgctttacttgaaacgttagaagaagctaaagctactgatggtatcgtggttcaaacactcgtacaagctaagttagctgagtacgcaactaatttttgcgttcaaaacaatattccgaacgtagatttattacatacgctaactgctgctgttgaagcaaaaactggcttaaaatcaaaacaagatcccggaaatatgcgccgtcttgatagcaattattttgatcgtattgctgccattgagtttgctgtaaagtacgatgactgcaaagatcctcgtggcctgttagatgcagatatcgttctcgtcggggtatcaagaacgagcaaaacgccactgagtagttttctcgccaatcaaaattggaaagttgctaatgtcccacttgtccccgaaatcccgattccagcagaacttttccaaatcccagcggaacgtattatcggtcttacaaccaccccagaaaagctagcgcaaatccgcaaagtccgtttgagatctattggtttagatgaagcaagtagttattccagtgaaaaacgtattttagaggaactagaatatggttatgatacattcaaaaaacttggttgccaagtcattcatgtagaagataaagccattgaggaaaccgctgccctaatcacggaaattatcacgagttaccactaattagaagaggtgaataatgtgagaaaatttgtctatcagttcagtgaaggttctaaggaaatgaaaaatcttttaggaggaaaaggtgctaatttggccgaaatgacgaatatcggtttacccgtccctcctggttttattatctcaaccgatgcttgtaacgattacacagctaacaataaacacctttccgaagccatttttgatgaagtgaaaattcatttggcggaactcgaaaagcaaaccgggaaaatttttggattcgcagaaaatcctctgctcgtttccgtacgttctggcgcacccttttcgatgcctggcatgatggataccgtgctcaatcttgggttaaatgaccaagccgcagaagggcttgccaacttaactggtgatgctcgttcggcctatgattcttaccgccgttttattcaaatgttcggtgacgttgtttttgaaataccgagctaccattttgaacaggctcttagtcgcatcaaaaaagcaaatgactaccgtttagacacagaattaactgcgactgatttaagcgaactcattgatgcttataaactaatttttagccaagcaactggcacagatttcccgcaagatcctctagagcaactacggcttgcgattatcgctgtttttgattcctggatgaatcctcgcgctgttatttaccgcagattacatgatattgatgcaagttttggcacagccgttaatattcaagcaatggtttttggaaatactggagaaacgagtggaactggaattacctttactcgcaatccttccactggtgaaaagaaagtgttcggggaatttttactaaatgcgcaaggtgaagatgtggttgcaggaattcgtacccctgagccgataagtgcactggaagagaggatgcccactgtttacaaggagctcctccatacttgtgaacttctcgaaaatcattatttagacatgcaagatattgaatttaccatcgaaaaaggaaaactctatgtcttacaaactagaagtggcaagcgaacagctaaagcagctattcaaacagccgtggattttgtgcaagaaggaaaaatcactcgccaagaagccatcatgcgcgtggaaactaagcaattacatcaattacttcatccaaccttcgatgaaagcgctctaaaaaatggtcaagtcatcgcaactggtttacctgcaagtcctggcgctgcaactggtcaaattttctttgcagcaaaagaagcagtccaagcaaccgaacgcggtattcctgtcattttagtgcgtaatgagacttctcctgaggatatagaaggcatggcgcgtagtaatgctattttaacggctcatggtggtatgacttctcatgctgccgtcgttgctcgcggaatgggaaaatgctgtatagcgggttgcgccgaacttacgatcaatgaaaaagaaaaaacgattattcttcctacaggcgacacactgcatgaaggtgatgcgctctccctcgatggtagttccggcaaagtttaccttggagaaatcgccctcagagaagcgcaaattggtggacattttgacgagttgatggcctgggcagatacggagaaaagactgatgatccgtgtcaatgcagataccccgccggactttaaaaaggcgcttttgtttggggcggaaggtattggcctgtgtcgcaccgagcatatgttttttgatgaaaaacgaatccattatgtacgccaaatgattttagcagagtcattaagcgagcgcgaatccgttttaaccactttaaaagaaatgcaaaaagccgattttagtgagttattccgtatcgctgacggccgcgcggtaaacattcgcttgcttgatccgccattacatgaatttttaccaaaaacgaagcaagaaattgagcaattagctagcgcaatgaatcgaacagttcctcaaatcacaaaacgaattaacgaactaagcgaagcaaatcccatgcttggacaccgcggttgtcgtcttgctatcacatttccagaaatttatcggatgcagacggaagcgattatcgaaagcgccgtcactcttcatgatgaaggaattgacgttcacccagaaatcatgattccgctcatcgctacgaaaagtgaactaagctatataaaaaaagagatgaaacacgcgattcatactatttttgatagagagcgagtgatgctaccatatgatattggtacgatgatcgaaattccgcgagcatgtgtaacagcagatgaaatcgccgaggaagcagagttctttagctttggaaccaatgatttaacacaactcacttatggtttttcacgtgatgatgctaccaagttcctagcagattattatgaaaaagatattttatcaaaagatccatttgtttcaattgacaaaaatggtgtcggagctctggttgaaatggcggttacacgtggacgaatgacttcggaacatttaaaaatgggtgtttgtggcgaacatggtggcgatcctgaatctatccaattcttccatcaattaggacttacctatgtctcttgttccccgtaccgcgttccgattgcccgccttgcagcagctcaagcagcattagcggaaaaacatttaattccaactatctaaaaaagccagctgataatcttagtgattatcagctggctttttctcttattatttttcgcaaatcgcaaagtaatttccttcgttatccgaaaaattgaacacccggcccattggtaaatcgaccaaatcaccaaccgtaatgcctttatttttatattcttcataaagttctgcaacattacttccaaatagtaaaatagatggtgtcccaagattcatctctgggttcatttccgccactttctttttgttttgaagaacaaaagtagtctccacaccttttgttggcgctatttcaatccactgaatttcgccatttacaacttcttctgaaacgacgacaaaatctaatttttctacccaaaaatctctcactgcagcttgattttctacatataacatcacttgaccaattttttcaatcatcgttcatcgtcccctcgtcatttctttttctttcaatccaaactccgcataaaagtcacgcttcatttctaacaaataacgcaaatcattcataaattggaataaaatcgctctattttcaaattccgctcgtgtttctgggagtttactgcttcgaaactcatgcaccatcttagtaatttccgccactaaatcttctgctgtattatgctcatctagcgtctgtgccgttttttctgtaatttctgccagcgccatactttgctcagaagaatgatcaaacgcgactaaatgccgtttcatttgtgttaaaattcgatattgtacaagccgcatatcaacgtactgggaataataatgggaagaagcaaaaaactgattgtctaaatttctcgctgctttttcctgtgcatagtctaatgtaccctttaattgatttaataagccaaactcatcatgatactccgactgattccgaagcccttgcgtcatttccgttaaaatttgccgcataattgcttctattttttgttggctgcgttttaattcgtcttccatttttggcatatataaatttaaaataatcgctatgccagcgccaactgccataagtaacagttcatttttaaaccagaaaaaggataatgattgttcaagtaaaatatgcgatacaagtacagagctcacaacaattccgtcagcaacatgaagtcttacagcaagcggaataaaaatcaataaataaagtccaaaactcaccgcattataaccaataagcatgaaaaatacagcagcaatagatagcgccaaaacggtcgaataaacccgctgaatcgctaattgtaaagacccctttttcgtattttgaacacttaaaattgcgataatccctgccgaaactgcatattccaagtgtagccattccgccaaaattatcgccagtgtcgctgcaatcgcggttttcaccgttcgcattccaatccgcatatgtcccgtcccctttctatgtccaacttatcatagcatgaaagcgaaaatcacaaaagaaaaaccttgaagatcactcctcaaggtcctacattattcttcatctaatgtttttttgaaacgcgctcggaaaaagaatcctaagccgaccactacaagtatcgcaatgatgctataaataattgttgaaaagctatccatgaaaacaacaatttcactccatgattcaccaagcatagcgccaagtccaattaaaactgtattccaaagtaagcttcctgcagttgtcaaaattaaaaacttcgacattttcatcttggtcatccctgctggaatcgaaatcaggcttcgtattagtggaatcattcgacataaaaatacggcccaacttccatatttcaaaaagaaattctctgcgcgttcaatatcagattccttcagccgcaaaatccggccgtattttaagacaattttcgtgagtcgttctttaccaaaataagaagcgactttatacagcaaaatagcgcccactacagaacctagtgttgctacaataatcaccatcacgacattcagtgatgtaactgtcgtcataaatccaccaaaagttaagataatctcagagggaataggcggaaacaagttttcaaccataatcaaaacaaaaatacctatatagccaaaatcagccataatacttgtaatccaagtttccaaaaaacacactcctgtactttatttcccttttaaagtaagtgcttgctttttaagtgtactacactcgtcctactttttcaatcgatttggtaaaaagaaaaagaacttgatacgttttccataccaagttcttttttatttacatttttaaatcagctttcgttgcgaaaaatcctgctaaacgatctttcacttttcggatgccgccagcttcatcactttctaaattcattggcatcaccggttcatgtaagctcattcgtagtaagaaccaaccttcaccaagcgcacctttcgtattcacacgaattccttcttggttcacaggttctaattccatatccggatcagcttctacgaacgtcagaaaatcagctaaagcttcttttccatatgctttaaaatcgtttgctgtaatgctcaaacgaatttcttcactttcagccggttcttttaaatccgctattaaatctggtaagtcttgcccattttttcgtaatgttgcgtaagtcattaaaattttggcaatgagataagcgccatcatccaagaaataattttcttttaatgcggcatgtccacttacttcgatagcaatttcagatggtgttccgtttgcatttaggcgcagtgcttcattgataacattacgataaccacgtttaaatcggtgttgtttcccgccttttgcttcgataaaggcttgcaaatgccccgatgttgtggagtcagtcacgatcgttgttcctggtttttcttctaaaataatactagagataacagcaattaatgggttgcggtttaaactttcgccatttttatccataatcgcagcacggtctacatccgtgtcaaaaatcacgcctaaatccgccccactagcaaggaccgcttttttcaaactagccatagcttcctcattgtcagggttcggaatatgattaggaaaatttccatccggatctaaaaactggctttcagaaatgtctgcgccaagttctgccaatactttctcagcaaaaaagccgccagcgccgttccctgcatcgactataatatggctaccttggagcggcttcattttatcagctgcatctgtgatccctgctctaatcttatccgttaagtctgctgcatatgtagaaagtaaatcttgttttgttaccttaccaagatttagtccattttctatgaatgatttatctgcgtgagccacaatataatcaatatcttcgtgttcagctccaccagatttcgtaaataattttagtccattatacataaaaggtaagtggctcgctgtaatcataatgccggcatcgcagtcatagtcctcgtactgagttgccataaacatagctggcgttgttgcaagcccaacatccacgacatctataccagcaaaagttaaccctttgacaagtgccgcttttaatcgttcagctgaaagtctgctatcatgaccaattgccactttcgcttgaccttccactttcttctcctcttttagccatttcgcaaagccataagcaatcttttctacacgttcgtctgttagcgtaatctgatatttttccgtagcaatagctattccacgtatgtctgatccgttttgcagtgcttctaacgctttcgtttctgattgattcatgtcattcctccagcttctgtatttttccccttcattatagcttatattgcgaaattttcacatagcttttacaaaagatgtgctctattcgcgataataatttgcaagtcaacggttaattcttctggtgggttttccagtaattcgttttttttatccgcttcaatatgccaaccaagtggcgtcatttcaagaaaatctgcaaataattctttggcaatcggcgctttgtaggtgactcgttcgacatgttctacgcttaacttttctgctaaccgtgatgtaaccgactcattcgaataactacttttctcatcaacataaataaattcgcgtaattcgcgtaaataattcgcttctggcactacttttaacaaaaatccatccttctttaaaagccgtttgaactccacgtaattcgatggcgataaaatatttaaaatgacatccgccgtctctgcttgattcgggcaattggctaaatcagctaccgtccaagaagtaccaggatagtcgcgtgccgcttgtttcactccctctttggcgatatctaagccaactgctttgacattaacaccagtcgcttgtaaattcgatacgactcgcgctaaatgacttccttccccgcaacctgcatcatataaaacaagttgttcttttttcttctccgtaataatttctgtcactcgttcgattaatttttcaaaaaagccactcgcaatcacttttttacgggattcgaataatgcttgatcgtattttgttttatgcgcttgttttagtaaatgtacgtaacctggtttggcgatatcaaacccatgaccttctaggcatacaaatgactgcggctctctaaactcgaatgctgcgccacaaattggacaagcaagaagcgccatattttctttcaaagcgcgtttatttatctccatttttgataacaattaatactcactccactcgaaaaacgttgcccgcaagcaggcaacgtttctactaatttctttcatacgtataaaaagtgtaattgtacttatttttttcatctttttcatggaattctttcgccacttcggaaaaattctcccaatccacttcaggaaacgcagtatcagcctcaaactctgcatcaatttttgtcacaatcagctgatccgccacatccataaataaacgatagatttctgcaccgccaactatatagattggttcccctgtctcagcaagggctaaaacagcttcttttgaatgaagtatctctgcatcatctaacttgagaccttgatctcgtgtcaatacgattgtctttctatttggtaaagcttttcctaacgattcataggttttccgccccatgacaagtgttttcccagtcgtcgtttttttgaaaaactgcaaatctcctggtaagtgccacggcattttgttatcttttccaatatttccagcgcggtcttgtgcccaaacaaaaataatcatccaagaaaacctcccttatactgaaattggtgctttaatcgatggatctggattatagccatcaagtgaaatatctgctacttcaaaatcaaaaatcgttgctggtttatctgaaagtactaattttggaagcgcgtgcggtgttctagataactgttctttcacttgttcaatatgattgttataaagatgcgcgtctcccatagtatggataaactcgccaacatccagtcctacttcacgtgcaatcagatgtgtgagaagtgcataactcgcaatattaaatggtacacctaggaaaatatcggcactacgttgatacagctgacatgataattttccgtccgctacataaaattggaatagcgaatgacatggcggtaaagccatattcggaatatcttctggattccaagcagacacaatcaaacgacgtgagttcgggtttgttttaatcatttcaatcaagtcagctaactgatcaattgtttccccttgcgaagttttccattcgcgccattgtttaccgtaaatattacctagctcaccgtatttagtcgcgaacgcttcatcttctataatacgtgttttaaacttctccatctcagcttgatatacttctttgaaagccggatcacgttccgctcttagtccaaagtctgtcatatcttcgcccttgtaatcatcgcttttcacaaaacgctcaaaagcccattcattccaaatgttattattatgctgtaaaaggtagcgaatattcgtatctccatgtaaaaaccatagcagttcacttactacaagtttaaatggtacccgttttgttgtcataattggaaagccttcctgcaaatcaaaacgcatttgataaccaaatgtgctgattgttccagtcccagtgcgatctcctttttgtgttccattctctaaaacgtacttttctaaatccaaatattgtttcatcgttcgcactccttattccgcgtattgtgataaaaattcccagcgttccatcatttgttccagctcagtttcttttgctgtaatgaatccactaatttctgctgcttttgtaaagtcggctccggtttgttctaatgtttcgttgagcgattcaatgtctttctctaacttgctaatcgcatcttcaattccgtcccactcgagttgttcttggtaggttagtttgactttttcttttttctcaggcgatgacttttcgaccgaagtattcgccatttttttcattgatttcgctggttttcctttagcctccagctctttcagataatcgctatattctccgtagaaaatttctacttcaccaatcgcccggaaaacgagcaatttgttcacgactttatcgaggaaatatctatcatggctgaccgtaattacggtaccattgaatgattctaaatagtcctctaaaacggttaatgtttgcgtatctaagtcattagttggctcatctagtaataagacattcggtcgttccatcaaaatgcgtagtaagaataaccgacgtttttctccacccgataagctaccaattttcttcccgtgtgaattaggcgggaataaaaatcgttctaacatcgcgctcacactaatcacttcgccaccggatgtcgttacttgctcgcctgcttcttgcaaataagcaatcattcgcatatccggatccatttcttcattttgttgtgtatagtaaccaatttgtacggtttgtccggtgactacttccccagcatccggcgctagttttccagctaacatattcagtaaagtggatttaccagttccgttgttccctgtaataccaaggcgttcaccgggttggataatcaagctgaaatcctgtaatacttgtttttcatcaaagcgtttttctaagtttttcagttcgaaaacatcttttccaagacgactagtaacaaagtcaatcgccagttctgagtcatcggtttttattttcacttttttctctaaatcgtggaaacggtcttgtctggcattttgtttggtggcacgaccttgaggaccgcggcgcatccaagccagttccttacgataaaggtttttatttttctcggattcgcgaacttcattttccatccgaatagctttagattccatgaacttctcgtagttcccaacgtatcgataagccgaacctcggtccagttccaccatgtgatttgtcacacggtcaaggaaataacgatcatgggtaacgagcaatacggctcctttaaagcgatttaaatattcttctaaccaacgaatcgactgaaaatccaaatggttggtaggctcatccaaaataagtaaatcaggcgtttcgattaagacttgtgccaaaccaacccgttttcgttgcccaccagaaagcgcgcttatttttgctgttaaatccgtaatgccaagtctttccaaaattgttttcgcttctgtgttcatatcccaagccgcactagcatccatttcctggctagcggcggtataagcatcgtgtaatttggtattttccgcatcaagtgacatcgcgagtaacacttcttcgtacttgcgcattgcccgaagcgccgcagtatccccgtcaaaaacagccgcgagaactgtatcttcttcattaaacgcaggatcttgcgccaaataaccaatcgtataatcttttgcttttgtaactgtacctttatccccagattcacttccagaaataatttgcaataacgtcgatttcccggtaccatttacaccgattaaaccaatacgttcgccctctgttatcgttagcgagatattttcaaacaggcttttttcaccatatgtttttgttaaattttccacttttaattgtttcatttattcccatccatttcctgttcgtccttatctattctagcggaaaacatagaacatatcaaataccttagattaaaaaagttccaaaagcgacgaatccacttttggaacttctagttttaaaataaaccttgcgcgttaccattttcatcgacatccatatttaatgccgctggtttttttggtaagcccggcattgtcatcacgtcacctgttaaagcaacaacaaagccagcaccaagttttggaataaattcgcgaatatgaatcacgaaatcagttggacgaccaagcaatgtcggatcatccgataacgaatattgtgtttttgccatacaaatcggataacgatcccaaccatattttttgaattcaacgatttgtttttgcgccttgctagaaagttccacaccaataccgccgtatactttcgtcacaatcgcttctagtttttcttccatcgaccacgcatcatcataaatacgtttgtagtccgctgcgccgctttccactgccgcaattactttatccgcgagttccaggccgccatcgccaccttttcccaaacttctgtcagggagaaaggaatcccgtgttcttcgcatagcgcttctaatttcgctacttccgcgtcagaatcagtgataaatttattaattgctaccacataaggaataccaaatgtttgaattgattccgtatgtttttgtaagttagtaaagcctttagctagcgcatcgacattttcctcgcttagctctgtttttaaagcgccaccgtgcattttcagtgcgcgaatcgttgctacaataacaacgcaatctggagcttttccaagggcaggaactttaatatctaaaaatttctctgcaccaaggtctgcgccaaatccagcttctgtcactacataatcacctagtcgaagtgctgtacttgtcgcagaaacactattacacccgtgagcaatatttgcaaaaggtccgccgtgtacgatggcaggagtatgttctaatgtttgcaccaaattaggttttaaagcatcctttaacaacaacgttaatgcgccttcgtaacccatttcaccaaccgtaattggttcttttttatagttataaccgatgacaatttcgcttaagcgtttctttaaatcttttaaatcacttgctaaacaaatgatcgccatgatttcagaagcaactgtaatatcaaaaccatcctcacgtggaaccccttgaataggaccacctagaccaaccactacttttcgaagcgcacggtcgttcaaatcaaccacacgtttccaaacgattcttctaccgtcaatttctaagtcattcccttgttgcatatggttatcaataaatgccgataaagcattgttcgctgctgtaattgcatgaaaatcgcctgtaaagtgtaaattaatatcttccattggaataacttgcgcatagccgccaccagttgccccgcctttaatccccatagtaggtccaagtgatggttcgcgcagtgcgataacagtctttttatcttttttagagagtgcgtcgccaagaccaactgtcacagtcgattttccttcaccagcaggcgttggattaattgctgttacaaggacaagttttccaggttctttgtcttttagcgagtgaatggtatcataggataactttgctttatactttccgtaaagttcgagtgcatctgcgtctagtcctaaatgttccgcaatagtcgtaactggtagaatttctgcttttgatgcaatttcaatatctgatttcactttatttgacatgatatcccctccgaatatgtatattgtaacaaagaattaagatgttttggcttattaatgcatcaaaaaagcgcgacaccaagcgatgtaacaccattttgattctaaagtaaagcctgattgcgcaaaaatcaacatctcaaccttggattaccgttattcctttgtttctggtttcgtcgtctccattgccttgagcgtcttaagcgcatctggatgattttcaaaaaattgcacaacatccccaattcggtcaatcgagttccaactcaagtggtgttcaataccttccacatcatgataaatatgggacggatctacgccaataatacttaaaaaactctctagtaatgcatgtctttctaggagccttttccccatttgtgttcctttaggtgtcaaaattaatccacggtatttttcatagattaaatattcgtccttatccagtttctgcaccatttttgttacagaggaaggatggacaaatagctcatcagcaatatccgaaaccctggcataacctttcgtctcaataagggaatagattttttcaatataatcttccatactaggtgttggcatagctataccctccaacttaaattctttcacatagccaattgtactataatatcgccctttctaaaagcaattaccctttcaaaaacgaaatttctcctagagcgttcctccgaaaaaacacagtaaatagtaccaaattaagacattttagtcaaaagtatgcccttacaagtccaaaaatttaaaaaatatcgaaaatcagcttgacgtttataggtattttgatttatagtgttagtatcatatgcggcaacgctatgaactgaaaaggtagtatttgcgagaaattttttaagttaaaatgaaagcgttttaacaaatgattctagcaattattagccatacttaggaggatttatttcaatgcaaaatgggaaagtaaaatggtttaacaatgaaaagggttacggttttatcgaatcagacggcggcgaagatattttcgttcacttcacagcgatccaaggtgacggctacaaatctttagaagaaggccaagcggtaacatttgaagtagttgaaggtaatcgcggcgctcaagcagctaacgtagaaaaagcctaaaccagttgccaattagacacggacttaaaaaccggcatagcttgccggtttttttattgcaaaaaaagagctttccttctataataaagccacatctactcaaacaataggaggcgcacaatatggaagttttcgttgatggtgcaagcgctggaaaccctggaccaagtggggctggaatcgtcctaaaagcagatggcatctatgaacaatttgctatcccactcgcagttatgacaaatcatgaggctgaatttatcgcaattaaacttgggctagaagaagccttaaaaaaacaagctacattaattcgtttatactctgattcgaaagttgcgattgaagcaatccataaacgacatgcgaaaaatcctttattcaagcctcatttagacgcaattttagaaatggctgattcgctagagttgttttttgctgagtggcgtaatgtaagtcaaaataaacaagccgaccaacttgcacgtcaggctataaaaaaacagaagcaacctggagtcaaataaccagattgcttctatttttattcgatatcccgagttaacgtttttaaaccgtatttttcaactacagcaaaagcatcttcgcggaatccgtcatatttcaagctaggcaagtctatctctagcggaacttctgtatgaatccgagctaatttttgacttaattctagcatcgctaagtcttcttgaattttggtttgttgggccggcttcagtttatcaaggttgtttagaactccctcaatcgactcatattcttgaataagtttaattgctgttttttcaccgattccacgtactcccggataaccatctgaagtgtcgcccattaatgctttcacatcaataaattgtcttggggaaatacccatctcttcaaaaaatgttgcttcatcatatcgtttataattgccataacctttttgcataatccaaacatcattcgtcggtgcgattagttgcagtaaatccttgtcgccacttaacacagtggtggcgatcgtattactcgcttgaacggtaattgtcccaatacagtcatctgcttcaaaacccggcacacctaaattgacaaagccaaatccagcagctacctctttcgctaaatcaaactgcggaatcatttcttctggcggcgctgttctaccagctttataaccatcatataattcatttcgaaatgtttgcgaccccatatcccagcaaattagtgtatgcgttgggttactctggcgaatcgctgcaaacatgtggcgcataaaaccttgcaccccattcgtcggtatcccctgttggttaaacataaattgtttggaaacggctgttgcataaaatgctcggaaaagtagtgccattccatcaacaacgagcaaattttctcgattttctgtcatatataatcctccattttccttctactgccatctattgtagcataattataactggctcgcagaaaaaaaggggctttttaccagcttgctttttttacgccgggtaattgtccttgatgtgctagttcacgaaaacgaatccgtgacataccaaatttacgcatgtagccatgtggacgtccagttagctcacagcgattgtgtagtcgggacggggatgaatcacgtggtaatttgcgcaactcgtcataacggccttctgcttttagtgttcggcgtagctccgcatattgttctacaagtgcttgttggcgttcatgtttagcaacttttgattttttagccataagtttctccttcctttaaataataatcattccgatttatatcatacgccgattttaaaatgaaagcaagtcttctgtttaaaaaaaccgatatccaccttgaagtggatatcggttgacatattattttgttccaacgattggaccatatgcattggagaaactattattgtacggcactcctgctttatttttacctgcatcccagttaacagaccaagtcataatccctttcactggcgtaccttttgcttgtaaacgagtgaaaacatttttgacgatttgtggatctgttacataaccagttgcggctgcatccacattggctggtaaaccaaacacgaatttattagccgggattttcaagtaaccgcgagtcccgttaataaaggagtccgccatataatataagaaagattcttttaatgtatcattattttgcgcaatccattggtttgtttcatcaacccaaacaccatcgccaccttggttgtatagttgtggcgcaatatagtcataataattagcaagtgaggttaggtagctttcgtaggcactacctggttttaaataaggaaattctggtgccatcgttattaagaaattttttccttccgctttataatgatctttgacgatttttagcgcagctgggataaccgttttattatctcccgcggtaatcgcactttgttctaagtcgatgtctaatccatcaaagccatatgtttctacttggcggataatttcattcgcgaacgcctcttcatccccagcttttagttccacgtgtccatctgctccacctagtgccaaaagaacggcccgaccttctttatttaatgcgccgacttgtgctctgaaatcgctatcatttattcccacaggtttaaatgttggaatacgatttactccgtctcccttcataaaggaaacatctaccacgttataagctttcggtgtatccttcagtgctatatctgccgaagtcccttgttgatagccatcttttccggaagatttccaactatgccagtacccaactagcacctgtttgttagaaatatctggcatcacagaagcgtcatccgtcgccgcttgtgctgtactgccaaatgcccccagtcccgcaccaactaaaagtaaagacaaaccaccaaccattacttgttttccattcatctacttttcccccttactttatctaccccaaacttacttttttggagctactagaaaatacccaacatagtgaaaataaaactagaaaaacagcaaaaaagcgaaattgatatagaccaatttcgctttcaaataaaggaatgtgtataagtatatgagaaaaaatagcccaattaaaactgttttatttttcacttcgcatgttgcggttctggatctgctacttttttatctttgcgatgtggaatcatattgaaaatgatattcagtgtaattgctgtcacactacccgcaacaattccattactcgtaaataaacgaacaaaggatggaaaagcattaaataaatctggtacaactgttacgcctaagccaacaccaactgcgcatgcaataattaacaagttttcttgagaagtgaaattaacttttccaagcatcttaatgccttgtgcgacaaccatgccgaacattgcgaccatagcgccgccgagaactggtgtcggaataatcgttgtcactgcaccaatttttggaatcaaaccaagaacaataagaaaaccagccgccgcataaatcactttacgtgttttaataccagaaagttgaacgagtccaacgttttgggaataagccgtataggggaatgtattaaatacaccgccaagcataatcgcaagcccttctgcccggtaaccacgcgttaaatctttttgcgttaatttgcgttcggtaatatcagataaagcgaaatatactcccgtcgattccaccatactgacaagcgcaattaaaatcatcgtaataatcgccggccactcaaatgtcggtgtgccgaaataaaatggtttcggcatatggaaccagctcgcctcactcactggaccaagcgagattcctttataaagcgctgcaaaaagtgaaccgccaaccagacctattaaaacagcaatcgccttcgaaaacccttgtccaaaacgatacactaaaataattaaaagtaatgttccaaaaccaaggccgagattatacattgagccaaaatcttttgctccttctccaccagcaagattattaattgcaacgggaataagtgttaaaccaatcactgttacaaccgaaccagtcacaacaggagggaaaaatcgtacaactttggagaaaaatggtgctattaataatacaaaaagtcctgaaacaataatcgaaccgtaaatcgcgccaatgcccatatcttgtccaattaaaataatcggcgcaatagcttgaaccgcacatccaagtacaaccggtaaaccaattccaaagaagcggtttaccgttaattgaagcaatgttgcaatcccgcacataaaaatatcaatcgaaactaagtaggtcatttcttctccgttaaaacctaatgctccaccaattaatagtggaacaatcaccgctccagcatacattgctagaacatgttgaaatcctaaagctgcaattttccctttacctaacatttactcctattcctcctctaaaaataagatttcttcgttttcaagtgaggcaattcgtgctagtgaataaactggaatccctgttttatttaataattcgcgaccttgttggaaagatttttcaatcacaatcccaattcccgccacctttgctccggcatgttctgcaatttcaagtaagccgagtgccgcctgaccatttgccagaaaatcatcaataactaaaatcgtatcatctgctgttaaaaattgttttgatacagaaatatcattcgattcttttttagtgtacgaatagacagtgcttgtgaataaattgtccgttaatgtcactgattttttcttgcgtgcaaacacgactggtacggagagcgcgagccctgcaaaaacggcgggtgcgatacccgatgattcaatcgttacaattttcgtaatccctaaatcttggaaccgtttagcaaattcatttcccatcgcttgcattaaaaccgggtcaatttggtgatttaaaaaagcatctacttttaaaacattccccggtaaaaccgtacctttttcttgaataaactcttccagtaatttcaaaacgattctcctttcaaaataaaaaaactgcttctctaaaaatagagaagcagtatagaagccaccaattttcggagtgacttctttatacaaactactcatagtccggttatttacggtaaccaggtagaaactcgtcgcccaatcgcaactattatacaagtatttcggttttaagttatgttgtttattatagctttctaaaggagcagggtcaagctaattttttacttattgaattggtaaacataagcgtatcttttttctagtaaatctagcaaatacgttggattcaagccctctcccgttgtatctgttaaaatttctaaaggtttctttgttttaccaaatttatgcacatgttcagtcaaccatattttgagttccgaataatcatcacttgcaataatcgcatcgatattcggaatttctttttgcatttggttaaagaactgtgctgcgtacattaagccaagtgcgtaggatgggaagtaaccaaaatcgccaccagcccagtgaatatcttgcagaacaccatttgtatcattatctggacgaatacctagatattcttcgtacttgtcgccccatgctttcggtaaatctttcacttctaattcaccgttaataagcgctttttctagttcataacgaatcataatatgtagcgggtaagttaatgtatcagcttcaattcgaatcagcgaactttcagagatattcacagcacggtagaaatcttccagcttcacctgatcaaaagcaggttttgtaatcgcttggaagtcagcataattacttttccaaaatgctaaactagagccgataataatttcatagaataatgattgcgactcatgaatccccatggaagccccattggcaagcggagtacctacaagtgctgcgtcaaaattttgttcataaatcgcatgaccgccttcatgaatcgttccaaaaacagccattttaaaatcattttcgttatagcgtgtcgtaatacgaacatcacctgtatttaagcctgttgcaaacggatgaaccgtttcatctaaacgtcctgcttcaaaatcaaagcccatcttattcaaaatgcgaatactaaattctttttgttttgcttcggatattttcgtgtttaatatcgtcgcatctggcttcacaccttcgttttcgattttttcacgaatcgccataatgccgtcacgtactttttcaaacacggaatcaagcacagaaacggttacgccaggctcatattgatcaagtaatgtgtcatatttattttcttcataaccccaatactcaacgaatttacgcttcatttctagaatttttgttaggaatggttcaaatgctgcaaaatcattttgttcgcgtgctgttgtccatgcggtttccgcttgcgctaccagctttgtatactctgcatattctttacttgggatttttttatttaaatcatatgttttttgagattcttctaaagttttacgagtgatttcggatagattttctttatcttgattaagtccagcaataaaagcagccatttcttctgacgtttgcatattgaaaatctcttcagaaagaacgccaataacatccgaacggccttccatcccttttgccggcgcgcctgtacgaagatcccagtaaactaatgcgagtgcttcttctagagcttccatctttttaatatacgctaaaaattcctcttctaatgtttctaccaaacttaactcctccattcaatcaatcttcttttttaggacgtggttttcttggaccccaatattgatataaatctgtgcgcaagtaaccattatataatttccgttttttcgtcgcttttttaccataaacttcttcaaaaagttcataagaagtcagcacatacacagaccatgtcggcatacgtttgtaaacaatacccatttcgcggtatagttggcgcactgcttcctcgtcttctaaacgttccccgtacggtggattcgcgacaacaaccccgtactcatcttctgtttggaaatcagctacttgtagttgtctaaaggtaattaagtccccaagaccagcttcgacagcattttgtttcgcaatttcaattaaacgagcatcaatatcgccaccaataatgtttagcggttgatcatagttagctaaatcttcggcttcttgtctcgcatctgcccaaatttgcttcggcatccagtcccatgtttctgatacgaattcacgattgaaacctggcgcaatattttgtccaattagtgctgcctcaattggaatcgtcccagaaccacatacagggtcataaaacggtctatccggatgccaactcgtaagtaatacaagtgccgccgccattgtttctttgattggcgcactaccttgtgctaaacggtaaccacgtttatgtaatcccgcgccactagtatcaattgttagcgtcacttcatcttttaaaatagaaacttctaacttaaataacgcgcctgtttccatcaaacgaccagaacgacgatatttttcactgacacgattaacgatggcttttttcacaattgcttgacagtcaggcacactataaagtgttgacttaactgattttccagccacaggaaactgtgcatctagcggcaaataatcttcccaaggtagagctttcgtcttttcaaacagttcatcaaatgtggttgctttaaaaacgccaaccacaattttcacccggtcagctacacgaagccatagattggctctagcaattgcagataaatctccttcaaaatatactttaccgttttctacttttgggtcatagcctaagcgcgctacttctttcccaacaattgcctctaaacccgaagcagccgttgccaccaactgaaatgttttcattgtgtcccatcctttaattaaatttctaatgaaaaaaagctgttttaagagggggaggtttgttttaaataggcattcaaccaggtcgaacacccaccttaaaacttgcgctccggccttctaaaacagccttcaatgttaaattaaatcctgtaaataacgctctgtaagccatgttctgttctttactacgtacagggtaatagtaaagagataaccatctatctgcgcaaaaatacatttgcgcctcgtcccttgttcttgattcctcgggaaaagtgcccctaccataagtttgagtttctcgctcgtggggtttacctcgttccacttccgagcatttctgccggaacttcgtcactgtggcaccttcaaggttataagaccatatccgaagacttaggtcattcacctgccgtcaaaccggaaaaccggaatgccctggcttattgtttgaccaggcacgatcactacgggcatcacagcaccgtgcgagcatggactttcctctgctttcaaaagaaaacagcgattatccgaacgttattcatttattcttaacttacttatactagcatacctattcgttatcgtccagcttatttccaaaaacatgtttttctaaattagaaagacgctttagaatatcaaagttggttgttccagcaggttgtgccgctgcttggaaagttggagctggttgtgttgaagttctaagcggtgcattatcaagctcttgtacaagtcgaatattttcagcttgaagcgcttcgatttcttgagtaaatgtactgtaatctttaataaccatgtctaaaaactcatcaacatcttcaggactataaccacgaagcccagttttaaattctttttccaaaatttctttgcctgttaagtgatactcaaattgttccgaagtcatataactccacctctatctctattcttacgtatttttgttctaatcatatacttacccttattttttcaaatctcacaccatttgtcaatctattcgagtgttttttatgaaaataactgtttacttctatattaaaaggtttgattcatgtcctctacaacttcttggagtgcataaaaatcaatgcagtctatataataattagactgttcttttgcttgagtcgctcggtcataaaaaaatttcggcgaaccttctttttctaaatcatatacaagtaacgcgccgtctgtattatcaataataaagccatctcttgctgcaaattgcgctggactttcataaggacgcttcgtaataaaagcatggtagtcggctttttctagtacttcgctcgcccataattggttcgcttcattccagttagcactttgcttttcaaatggttcaaggattgctagtttaatcggatagtctgcttttaattctgcaaccacatcgccagcccaaagttcaatccctagctgaccagaaataatcacccattcaagcccatcttccacgagtggaagcaaatgccgtttaattgtttcttttatataaaccgcttcatctgcatcctttttaaaaattccaagttcaaaatttttataccccgtcactgcgatggatttcacattaattcctcttttctttttaagaaatctctcactcttgttagtgtatacttggtagattggtaatggtctaggaagtgtttataaaaagactttccattaaatgcacttactgctgtcatttgaacattatcacaagcttgtcttaattgtagttctcctaaataaggaggacgctctttgtttacccacggaatagctaattctaaaaatgcatccgcgctattttttgcttcatcaacgaaaggtttcatatctttataaaaatcaaacggttttgcttcttcacggttacttaaatataattcccaatttttttcgttttgaagaagcaatttttccgtacggtttaaaagttccattctatcactcttttcttcacattttcagatacttcaagcatagcataggacgcaaaatcttgcctaaaattagattattagctaaaatatggtaaaatagacgaaggtacgttctatttatgaggtagtttcatgccgaaaagagctattttgcatttaattgatactatcattttcatttttatttgttataatagatgatagtctaaaattcagaatagaaattttctgatagaggtgaaaaaaatggctattggttaccctaacggcaagaagtatgcagcgagtcatgaggttcttcctcaacaaaaacggaaagctcctgtaacttacggtaagcgtggtatgtctttggaagatgacctaaatgatacgattgcgtattatttaactcacgaaatagcagtcattcacaaaaaacctacccctgtccaaattgtcagtgtggactacccaaaaagaagtagtgccaaaattaaggaagcctacttcaaaacaccatcaacaacagattataatggtgtgtataaaggaaagtacgttgattttgaagcaaaagaaacacaaaatacaacttcttttccgttgagtaattttcacgatcaccaaatgacacacatggcaaacgtcttaaaacaagatggtattgtttttgtcattattgctttccaaaaactcggagaaactcatttcattccctttgagaaattttatccgttttgggaacgtatgcaaagtggtggaagaaaatcagttactatagcagaaatacaagatgtatcagaccaaattccttatggtctaaatccaaggcttgacttcttgcaatccatagacaaattatacttctagtcaaaccttttttaaaggagagagatttttaatggcagataaaccgcagacaagatctcagtatcgcaataaacaaagtggtggttctaaaaagaaatcccaaaaacgaggaaaacgagtagcagcgaatattttcaaaactattttctttgtgggattatttttagctttctttggtattgcggctggtgcaactgtcttttacgattacgcaaaagacgcaccaaaactgaccgactccaagctacgagatccgctttcatctaagttacttgataaagatggaaaagttttcgcagaagttggaaccgaacggcgggaatatattgaatacaaagatatacctgaaacactaaaaaatgcaattctaacaacggaagatgcgcgtttttatgaacatgatggcattgacccaattcgacttggtggagcagtaattgccaatttgacagacggttttggtgcagaaggtgcaagtaccctttcgcaacaaatcatcaaaatgtcctaccttgattacacaaacaaaacacttgcaagaaaagctcaagaagcatggttagctcttcagttagaagaaaaatatagcaagaatgacatcttagaaatttatgttaataaagtctatatgtcagaccgtgttcacggcatgcaaacagcttccgaacattatttcggtaaaaatgtgaaagaccttacgttagctcaaacagccttacttgcaggtatgccacaaagtccgaataactacaatccttatgaacacccagaagcagcaaaaaaacgtcgtgatcaagttttaacaaacatgtatacacacgataaaattacaaaagaagaaatgaccgaagctcaaaaaacacctatcactacaggacttcgctcgaaaaaagatcgtgaagataaaatttacaaatacgattcttacgtaacacaagtgttaagtgaaatcccaaaagaatatgatgtttatcgtgatggcttaaccattcatacagctcttgaccgtgatgcccaagagtacacggagaaaatgctcaatacgaacgaaattgttaacttcactgatgatgaaatgcaagcaggtattgttctgcaagatacaaaaactggacgtgttcaagcaatcggaggcggacgtaaacaaaaagtaactcggggttataactatgcaacccaagtaaaacgttctgttgggtctactatgaaaccaattgccgattatggtcctgcttttgaatatttggattggtcgactgcccatattttagaggatgaaccatatacgtattctggtggaacccctattaacaactgggatttcggttacaaagggccaatttcagtaagacaagcactttatcaatcgcgtaatattccagccctaaaaacacttcaagctgtcgggctagataaatccgaggaatttgttaataaactcggcatcacctatgatgaaggacaaaacgtagaatccaatgctatcggagcaaacagttccaacccaatgcaaatggctggtgcctatgctgcattcggtaacaaaggaatctacaacaagccacacactgttacaaaaatcgttttatcagatggacaaacagaaattgacacagaaccacaaagtactgttgctatgaaagaatcaactgcttatatggtttcagatgttctaaaagatgttctttctatcggaacaggtacatcagcagccgtaccaggcgtccctgctgctggtaaaacaggtacaacgaatattccacctgaattcacttcgaagtactactaccctagtggtgctgcccgtgactcatggttcgctggttatacaaccaattattctattgctgtatggaccggctatgatgacaagaaaaaatatgtatctgcaagtgaacaaaaaattgcgcagcggatgtttagtaaattgatggctcatgcatctgctggtaaaactactgcagatttcaaaatgcctagcaatgttgtttccgtcccaattctaaaaggcagcaacccaatcgcccgtgctgcacaaggcacttcaagcgataaagtaagttacgaattattcttatccggaaccgctccaacaaaaactgcttctactccagaagacgagaagaaaaaagcagaagaagctgcgaagaagaaaaaagcggaagaagataaaaagaaaacagatgaagagaagaaaaaagaagaagaagctaagaagaaagcggaagaggaagcaaagaaaaaggctgaagaagaagccaaaaatcttactgcccctgccggcttgagagcaagttataacgctggctctaagcaaattaatgtttcttggtctgcagtagaaggagcaacctatgaagtaacagtcaatggttccactactacagtatcttctacctccgtttctgtaagtggcggtaatcctggagacacagtttccattaatgtcgtcgccgttaaagatggtaagcgaagcccagcttcctctaccactgttaaaattccagatagttaatacaaaaagagcggaagatgtttaaacatcttccgctcttttttatgatcttttcgcaatcaatttacgttgttctaacattaattcatttaattgtcgaaaacctaaatacgtattacctcgctttaatacgtattctagccgctcgtctaaattgagcggttttgtttccaacgttttaatttggtccatcaaattatctagctgtaccggtctgtgattactccaaaataaaatggataaaaaaatacctagcgcatctctaacagttacaggagaaggctttttatgcactttcaaatcagcttccatactttctgccaaattggtcatatgtttcgccaatttgcgacaagctcgctctgtttcatttttccaaggaataactccaccacctttggtaaaaaactgttgttcttgccaaaaaggtaggccactaacataaattgattctggatcatattcttctaaaataacatccggtgctgggaaatcaggatgtgttaattctactgcatatttaaattcagccatcgaatcccctcactttcgcttgtttttttccttctctacataaataaagtaaaggacaggtcgggcattctgggtttcttgctttacaatgatatcttccaaagaaaatcatataatgatgtgcatcagaccagagctcttttggtagttttctttttaacgtttcttccacttctacaacagaatctttccatctacaaatccctaagcgtttactaattcgttcgacatgtgtatctactgcgattgctggaacaccaaagccaactgataaaacaacattggccgtttttctaccaacacctggaaggctctcaagttccgcatgcgtctttggtacttccccattaaattcggttagaattttctcggataatccttgaatattttttgctttattacgatataagccaatggagcgaatatcctccatcaattcttccagtggaacagccaaataatcttctggtgagtggtatttttcaaaaagcgaggcagtcacgcgatttactaacacatctgtacattgcgcggataatacaacagccaccagtaattcaaacgtatttttatgaactagctcacagtgtgctgctggaaacatttttgccatttcttctatgcataatacggtttgtttattcgataacaatttctgtacctcacccttttcttttttcaagccagtcgtatagaggaatcgaacctgcgctttttttcacttccgtttggttaattgtttggcttgtgcgcccattttgatgaaattcttccgctacacgcttggcatcttctgttgtcttaacaccttgttttgaccagttaagcagaattctatcaatatatcggaaatttaatttttgcgaaataacagcttcttttaatgcttctttgattaaatccgggctcgttctatcttgctctacccacgcggataacatttctgcctccattggagaaagcggtcttccaaactctgcttcgaatagagtatataaattggtttgtttttctaactctttttcatgtttactatctgcttccttgttttcatataaagcgactagtttaccccagagtggcgccaaattatattgttcagaaatcattcgtgaattatcttggctttgttcgatagcaatcacaccttttttcaagagtgagtccatcgttttaattgtttcttcgagtggaagtgttgttctattggttaacatttccatcgacgggaaaaattctgcctctgctgcaaaggattgaatttgaagtaatagcactagttctatttcgtttaagccaatggttgcatagtttttcactagcacttgcggcaatgttacttgcccttcagccatccatttttcaagaatttttggattcatatttaacacctcactacaaaattataacatggttttcgagggaaaaatataaaagtactgctaaaatcatgaaatccactggaaaagattattttcaatttaaagtccacaaaaaaagtgaagccatttgttggcttcactttgtaacttacggatataaacggtttagtaaacgtgggaatggaatagtttcacgcacatgttctgtgcctgaaatccaagcaactgtacgttctaagccaagtccaaaaccggaatgtggtacagaaccataacgagctaagtcaagataccagctataagcctcttgatccaagtcgaagtcttccattctagcttgaagcgtttctaaatcatgaatacgttcggatccaccgataatttctccgtaaccttcaggagcaatcatatcagcacataaaacaacttgatcgttttctggatcttctggcatataaaacggtttaattgcttttggataatgggtaatgaaaactggtttttcgaagctgtctgcaatcgctgtttcatgtggtgccccgaagtcgtctccccaaacaatatcatcaaatcctaattcgtgtaaacgttcaattgcttctgtataagtaatacgtgggaacggtgcaaccattttttctaaatgactcacatcacgaccaagacgatctagttctaaacgacagttatcaagtactgcttttactaggaaagccacgtagttttcttgtacttgtaagctatcttctaatttgtaaaatgccatttctggttcaatcatccagaattcaattaagtgacggcgtgtttttgatttctcagcacggaaagttggaccgaatgagaatactttaccgaaagccattgctgcagcttccatgtataattgcccactttgagaaaggaaagcatcttcttcaaaatatttcgtatggaaaagttcggttgttccttctggagcacttccagtcaagattggtggatcgatttttaggaacccttctttattgaaaaattcatagctagcgcgaataatttcgttacgtattttcataatcgcatgttgacggttagaacgtagccataaatgacggtggtccattaaaaattccgtgccatgctctttcggtgtaattggataatcatgtgattcactaattacttccacactagatacagccatttcatagccaaatggggaacgagtatcttcgttaattgtacctgtgacatacaaacttgtttcttgcgttaaagctttagcagttgcgaaaatatcatcgccaacttctgcttttacgacaactccttgcataaatcctgttccatcacgtaattgcaagaaagcaatttttccacttgaacgcttattcgcaagccatgctccaatagttacttcttttccgacaaattcggatgcttgattgattgtaattttcacttgtctacactccctatttcataaaacttttgattcgatttatagcttcttggaataagtctggatttgttgcataagaaaggcgtatataatcgggcattccgaatcctgagcctggaataactgcgactttcgcttcttctaaaagagctgctacaaaagcatctacatcctgaaaaccttttttatgtgccgcttcttttacttcaataaagaaataaaaggcgccatctggttttttcggtttaaatcctggaatactgtttaattctggataaaagcgttccattcgttcttcaaaagcttggtacattttttctggaacttcttgactacctacatacgcttcaagtgcagcatactgggcattagctgtcggattacttgttaaatggtccgccagcttgctcattccagcaatgatttctttatttgcggctgcgtaaccaatgcgccagcccgtcatcgaatatgctttagacacaccgtttataacaatggttaagtcatataaacggtcacttaaactcgcaatagaaactaaatcagctttatttccatagtataatttttcatatatttcatcagataaaatataaatttgatgtttttcagcaacttcgccaatagcaataagctcctcttttgtataacacataccagaaggattatttggtgaatttaaaacgattgcttttgtttttttcgtaatagctttttcaaaatctgctgctgaaattttaaaatctgcgtcaaaaccagtttctacaaagacaggaataccacctgctaatttgacttgttcgggataagttacccaatacgggactggaataatgacttcatcgcctggatctaaaatcgtttgaaacgcagagtagagaacatgtttagctcctgttcctacgaaaatttggtttgtttcgtagtttaagaactgatcttttttgagcttgtcgacaattgcttgtttgagctcgatgattccactagaaggagtatatttggtgaatcctttattcatggactctattgctgcatcgataatattctgtggcgtattgaaatctggttccccagcacctaaaccgatgacatcaattccttcttgtttcatttgttttgctttagccgtaatcgcaagtgtaggcgacggggctactcctttgacacgttttgataacggtaagtccattttattccctcctccaatttagttacaagttttcaatctctctgtaccattcacctgtttcaaagttaatgtcaaagtagtttagcttgtcattcttatctaagtaggcaacttcccaaataggcgtttctttttccattcctaaattcacatgtaaaattttctttggtttcttttcttttgtgactttatcgcgtgcttgttgttctgtaatcccatcagatgcgaatttaacatatactttgtcggattttttctttggaacccaaacaatgatattcttattcttactgttcttaccagttaatacgtaatacacttcttttggaccattataaagataaaattgatccgttgtttttaaatcaacttggccacttattcggtctaaggcttctgtttctgcattggttactggtttttctgcatatctaaagtacagaaaagccgctacgacaagcacaataattatgccgagaataatcgctatccatttgccaatcttacgcttaggttttctatttcgcaaagtaatctcgctcatttctatttctaaattaccggaattcctccggcgatatgcattttcattttcgcatagatacattatagcaatagccgcttaagatttgaagtcatatcaggaaaaatttaaccttccttaaagaattcactcacttcttctaataaatcagcctgtttgcctttcaaaattggtgcgcttggaattgattccaaaaatgcttttccaaattttgtcgtatctactcgattatcaaagacaaatacgattccgcggtcggattctcttctaattaatcgaccaaaaccttgcttaaatcgcagtacagcttctggcagagaataggtttggaatgcattttccccgcgttctttgcgaagggatatttgtgcttttgtataaggatcatccatcggcgcgaatggtaatctcacaataactagacaagacaagtcttctcctggaatatcaattccttcccaaaagctggtcgtaccaagcaaaatagccttatcaaacatttgaaattgctttgtcagtcgtgcggcgcttcccgctgaaactccttgagctagaacgacgtattcttctaatgatttctcatttttcatgtgataatacgttttttgtagcatatcggaggcggtgaaaagaacgagcatacgtccatttgttttcactgctatgtgccgaatatattttgctagttccgctgtgtatcgctcgattggcgtatctttaattggtggcatatcatctggaatcatcacccgtgcattttctttataatcaaacggtgaaggaatacatttttccataatttgttcttcttccagaccgagactttttcgtaaataatcgaattttccttttacagttaaagttgctgaagtcatgatgacgctctcttttttagcaaaaaattcttttccaagcgtcggctctacttccatcagcacagcttttaaacgaatgctagaaatagaatggtttttgtcagcttgtaaataaatagtcaaaataggcgacttcttatgcagcatttgctccagttgttttgccatattcttccaatcaagtaaaaaagcatacatttcttccaaaaaggcgctctctgcttcacctagttcattttcctccaattttccttgctctagcaatgtttccatatttttctctgactcttttaacaaataaagtactttctcagctgcataataaaccttgtcattccaagcatctttttcgctattttctactaagacaacttcttgcaaatttttacgtgcgaagtttaactgcattttcaggaggacgaaaagctcttccaccgcatcacttaacttcatcgccgcaatatctaaatcatataaactgtctgcttctggaaaagccattgcaagccttgtgagaagggaatatttttctaaagagcctagctgatttaaaaagtactttaattttcgataagaaagaacaaagctaccttgcattcgagcactatccgcaaaatgatgcgcctcatcaattactgcaaaagcatatttgggcaatgtttctctacccgaaaaatgatcatttaagagtagtgcgtgattgacaattactaaatccgcattttttgcttgtttgatgttgaatttatagaaatcgtgcgcgagccatggatcatgcttttcagataaaaaccaccccgtgtgcttcattcgattccaaaatagttccccaccacttgataagttcacttcatcaatatcacctgtcgttgtttccgtcagccatacgagcaatttaagcttcgtaacaaccacatcgtattgtgtatcaacttcttgaagcaactgctcaaatttaaacaaattcaaataatgatcgcgcccttttagcaagctggctttcactttaaatccagttaatttcgttaaaagtggtacatctttttcgaacaattgagcttgaagtaaattagtatatgtactaataactaccggtaattcggcttgttttgcttggtaaatagctggcaaaaagtaacctagcgattttccaatccctgtccccgcttcaatcaaggcatgttttcctgatttcatcgcttggaaaaccagattcatcatttcaaattgaccacttcttgcataaagtggtgctccagcttttttgaatagcgccattttggcttcgtccgtttcaggaaattcaagtaaatctgccctactgtaagttggcttttcgacttcttttttacgaataacaatcccgcgatgttcaacaaaattaggattaagcggcttgttttctcgctctttgcgcatttcaatttcaaataagagctctggtaaatagctttttaggctaccagaaatcgttgtcatttgacgaatgacaggtaatggtaaattttctagcttttctaagaggagaagtagtaaatctgctgtcacttccgcatcactatccgcacggtgaggcttatcatgcccaagattaaattcatccgataaatcttgtaatttataactatcaatgccaggatacataattctagctaactccaccgtatcaagttttttcattttgccaagtgaaattccagcacgtgtcatttctcgttctaaaaacgtccagtcaaacgatacattatgtgctacaaaaatagtatcttctagtaaattcgcgataatcggtgcgacatcttcaaacagtggggcatttttaacatcttttggagaaattcccgttaattcttgaataaaggcaggaatcggtttttctggatttaaaaatgtcgtgtatgtttccagacgttttcctgattcaacaaagcaagcagcgaactggataatccggtcctctcgtgaagcttgatttcctgttgtttctaaatcgacgactatatagcgtttctgtttcatctgctccacctctttccttcactgcttttattcaaaaataacgattcaaacaaacgagtagcttgagcagaaatccactcaagctccccgaactgattataaagtcgtatgtgctttttcttctggaagaatcatttcaatatgatttttttcatctaaaacgactattttgggttcatgtgttttcgcttcttcgtcagtaaacattccgtaactcataataattactacatcgccgacttggacgtgtctagctgcagctccgtttagacaaatcacaccgcttcccggctcacctgggataatataggtttcaattctagcaccattattattatttacaatttgaactttttcgtttggaagcatatccaccgcttctaaaatagcagaatcaatcgtaatacttccaacataattcagattggcttctgttacagtcgctcggtgaattttgccattcatcattgttctaaacatgttttaccgcctcttcacatttattaattcattatcaattaaacgagctttcgaatattttactgccgctgcaataattatccctttagaccagtcagttactggtgtaaattcaggataggagtagatagccaagtaagcaataagctcatgggatgtttgctcatttattttttctgtcatcatctgaacaattttcgcctgatttgtttcaccagattcaataagttttcttcctagttgtaaagcttcgtgaatcactggcgcttcttttcgctctttttctgttagatagacatttcgtgaacttttggcaagtccatctgcttctctaacagtcgcaatgattcgtaaattcacagggaaaaagtagtcttctactaaacctgaaacaacggctacttgttgggcatctttttgaccaaagtaagcattatcggggctaactaagtgaaacagcttcgttaaaaccgttactactccatcaaaatgaccttcacgatcagcaccatcaagtacagatacccgtttgtccacatgtaatttagttgataattctgttggatagatttcttctactgtgggtacaaataaaatatccacgccaccttcttctgcaagcttcgcatcgtgtgcttcatctcttggataggcatcgaagtcttcatttggtccaaactgagtgggattgacgaaaacactcatcacaacaaaatctgactcttttctcgcatggctgacaagagtcatatgtccttcatgtaaaaagcccatagtcggtacgaaaccaattgttttattcgcttgtttttgttttaaaataacttctttaagctcttgtttattccgaatgattaacatttgctattcccttccatagaggccttttaagtcttcttcggccattgtaaagctatgtttcacttctggaaatgtctcggctttcacttcttttacatagcttgcgagtgctggttcgattgtctcgtcaatatctgcataagcttttacaaattttgcacggcggctgattccataaccgataatatcgtggtaaacgagtacttgtccatctgtttctaaacctgctccaataccaattgtaggaattgaaagtgctttacttaccttttcagctaattggcgaggtattgcttcgagcacgattgcaatagctccagctgcttctacagctaatgcattatccattaactcttgtgcttcttgggcagatttagcgcgtactttatagcttccagttaaaccaacactttggggtgttaagccaagatgagcgacaactggagcacctgcttcggttaaacgagcaattttgttaacgacttctcctgctccttctaatttcactgcatgagcgccactttcttgaataattttacgtgcattttggattgtttcattcactgaaccatggtaagtcataaacggcatgtcagtgacaataaatgtgtctgtggcacctcgcttaacggcttttgtatgatgaatcatatcatcgattgtaactggtacggttgaatcgtagcctaatactaccattccgagtgaatctccgactaaaatcatatctgcttctgcttgttctacattcttagcagaaggatagtcataagcggtgatcatcgtgattttctctccgttttccttcatagcaaaaaagtctactggtcttttcattttcttagctccttttcgtccctgttaaattactttaatcaaggcaaaaaacatatttttttagtagcgttagtatgatccggtaaaggtatcatccattcattgctaccatatgtataataacataaatggatgcttacttaaagtatgtaaattgaagagagatctactctgaaacctctccacttactttattcatccaattcgttaattttgcaggctcatccgttgctgcataggtggatgctacttttccatctttcaaataaaccatcgttgggacagaatcgatgtccatcttttctaaaagggcaatcatattatcgcgactcttttcggaagctttatctgtgttataataagccattttttggtctggttgtctttttttaagttctttttttaaaataggctgaaatgcttggcaatcttcacaggtcggacgcccaacgtaaacaaagccagttgttttatcggccattttttgcttaaaatctttggtggaaatggtagttaaaaaagttgcgctttcttcttccgttttattcgctttctcttcggtttcttttttattatcgctacatgcccctacggtaagaactacggtaattagcgctaatagtaatactatttttttcatcaaaacaactccttcgtgcttattgtacttgattttcccccaaaaagaaaaactcgaaaaagtgattttcacactatgttttcgagttaaaagatatgtttttgggtattttattaggtctaaaacgttcttttctatagtttttcgttatttttcattatctagcaaaatatctgcagaatagattgaatgcacttcaccaagtgtgtcttggagtaaaagtacgccctcatcagaaatgccttttacttgtccgtgaattttgcctttcgtggtgctggcagttaatttctctccaaacggtatggcttttgtttcccatagcaattttatcggtgcgaatcctttatctagaaaaagctcataatatttttctaaagaagtgaggatttcttgtagtaaagcttttcttgagacgctctcgcctaattctagtttaagcgaactggctttatccttgatttcttctgggaattcctgttgattgacattgattcccattccgataatcactgcatgaatcgtttctgcctccgcttgcatttctgttaatacaccacagatttttcgttttccgatgtaaatatcattcggccatttgatttttggttcgagctttgtgatattttcaattgcttctgtgattgcgagtgaggcgataaacgtaaactgtggtactttttgaatagggatttgtggttttaaaattacactcatccaaataccttcccctttttttgaactccaggggcgtagtaagcgaccttttccagctgtttgctcatcggcaacgataacagttccttcagggcttgtttcgatctgttggtgagcaatgatttgcgtagagttaactgattcatggacttccaagtgctggccgataaatttggtttctaaaccgagtagtagggcatctttcgtgtactgttccgcagttgcagataaacggtaaccacggtttctaactgcttcgatttcaaatccttctttacggagggcttccatctgcttccaaactgctgtgcgtgagcatcctagactatccgcaatttcttgccccgataaataagtgccatcactttctgtaaataaagcaagcaatttttcccgattattcttcatgatagcctagccaccttttaatctgatttttttcattgtttatttcattgcaaaggacgccgcattccaatttatcaagcgtctcttttacccaaggaccagcgctttctccggaccattttaataaatctgctccggtaatggctaagtctttcttggagtgaattggtaacgcctcataagcttgacttagtttatgttggttgttttctttccctcgaataatatttagttcatttactagtgagaaaactgccttgccagcatgataaagttcttccgctagccatgtctctttcatttttagcgcatattgatacgctttactcactagttgaattgttttattgggtaatttccatgcttttagaaatgcgttaacattatttggttgaacagtaacgacaagcccgagccaaatcgcatcatcagttgtccgttttccccaatcccaactaccaaattcagttagagcttttttttctccttttaaacctggcagataggtttccatttccacttttaaaagtaggtccatcgctcttcttatcgctggacctttaatcatttttaaccattcgaccgtaattctctcaacagaagtatgctgtaataagccaatctggctttctaaagctttctctgtttcactatctaattgaaaatccagttgactcagaaagcgtactcctcgcatcattctaagcgcatcttcatgaaaacgctcggaagctttgccaactgctttgattgctttgtttttaattgcttcttgtccagaaaacggatcgtgtaaagcgaaatgttcgtccatcgcaatcgcattcatcgtgaagtcacgacgttgtaaatcttcttctagcgaacgaataaatttcacttcgctcgggcgtctgaaatcttcatacgttccttctgttcgaaatgtagtcacttcataaaattcattattttctctaactgtaactgttccatgcgcaattccagtatcataagtggattgaaaaatctcctttacttcttctggaaaagcactagttgcaatatccacatcggaaatcgttctatttagcaagtaatctctgacagacccgccaacaaaatacgcttcaaaacccgctgtagttaatttttgcaatacaggaagcgcttttaggaaaacgtcattcatctgtcatcgctcctttattcatcattccttcttaaatcccgccaatctaagaaaccagctcctaaaccacgaattaaaatttctgctgtgccaatattagtcgctaaaggaatttcgtatacatcgcataatcgaataagcgccgtcacatctggttcatgtggctgagcagtcagcgggtcacgcaagaaaataactaagtccattttattttccgaaatgcgcgcaccaatttgttgatcgccaccaagcggtccagatttaaaacgatgcaccgttaaaccagttgcttcgataatccgtaaacccgtagtcccggttgcatacaattgatgtggttcgagcaaatgtttatacgcagttgcaaatccaaccatcaaatccttcttttcatcgtgcgcgattaatgcgatatgcatctcattcacctatccttagtctaaaatattttctaagccataaataagtgtttctagttctttcgttttacgaacagaaagagccacgccagacataaaggaaattcggtcatacgagtcgtggcgaattgttaatccttgtccctctgctccaaaaatcacttcttgatgtgctacgagtccaggtaaacgcacactatgaattcgcatgccttcatattctgcgcctctagcaccttcaataagttctacttcatctgctgcaccttgtttaacgaattcacgcgtttccgccatcatttccgcagttttaacaccggtaccacttggagcatctaatttattatcatgatgtaactcaataatttcgacatttggaaaatacttagctgctttttgcgcaaattgcatcattaaaacagcacctacagcaaagtttggcgcaattaaagccccgatttttttcgactctgcaatcgttcttagttcgctaatttgttctggtgtaaaacctgttgtaccaacgaccgcgcgtacgccgtgctctaaaatcgttttcgtgttactataccctactttaggagtcgtaaaatcaacgacgcaatctggttttatttcttccaacatctcgcttaaattaccaaaaacaggtacatctaacgagctaaattccaccatttcatttatatttttttcttttggttcatggtcaagtacagctactaactctaaatctgcttctcttaaaacagttttgacaacctcgtgtcccattcttcctttaaatcctgataccgctactctcattttgctttttcctccttttttgtccaacgatccttatcgcgatctttaaattttgccatgaccgtatcgtgtgctttttccatatcaatatcaagtgagttggccatacacgtcagtacaaaaagacaatcgcctaattcctctgccacggtcttggttggctcacttgttttcttcggtttttcaccataataatgattgatttctctggctaattctcccgtttcttcggtaattctagccatcattgctagtggggaaaaataaccttcctcgaatccaccaatgaaatcatccacttctttttgtatttctgccattgttttcgccatcggttttccccctttatgtggtaaactaaaatagattttaagactaattgttaacttcatttcattatacctaaacaaatacatacaagtccatgattttttacttacatattaaataggttccaggagggaaaaagctatgctaaaaacattacgcacgaaaaacatttgctttattatgcttggtacggcgatttacgcatttggcttagttaattttaatatcgccaataatctcggtgaaggaggtctagctggagtaactttattccttcttcactttttccaaattgatcctgcatactctaacttaatattaaatattcctttgtttattttaggatggcgggttcttggtaaccgttcactcatttacacaggcattggaacggttagtttgtccctatttttatggattttccagcgaataccttatacgctagatttacatagtgatttacttttagtagctctttttgcgggtggttttagtggtattggtcttggcctcgtgtttcgatacggtgggacaactggcggtagtgatattatcgctaagttgctaaatcacacgaaaggaatcagtatgggacgtacgctatttgctattgatgcgattgttctagttgcctcgctctcctatttagatgtgcgtcaagtcatgtatacgctcgtagctgtattcatcggttctcgtgtgattgactttgttcaagaaggagcttatgcggctcgcggtgcgctcattatttctaaagataatgacgcgattgcttcccatgtgatgctcgcgatgaatcgaggtgtgacagtgctggaaggtcgaggcggcttctctaaaaaagaccaagatgtcctttacattgtcgttgcaaaaaatgaaattattcaattgaaaaacattgtccaagcaattgacccgcatgcctttgtttctgtgagtgtcgttcatgacgtgatgggtgaaggtttcacactggatgaaaataaaaatcctatctactaatgtatttacttggctcataattttctaaaacaaaatcgctggcgttcccaagcgctaaatcagccaaaatcctcccaacatatggtcctgttgttaaacctgaagcacctaaaccgttagctaaaaagactgattcaaaaccagggagctgaccaataatcggcgtaaaatcaggcgtgtacggtctagttccaaccgacacatgggccactttactcgctaaatcgccttccataaactgactaacttctgttagtatttctgctttaccttctgctgttggttccgtattgaagccagcagctttttcatgcgttgcaccgacgataattttcccgttatcaaaaggaactatcgattttgcgcttggtggtagaatcactggccaatcatccgtttgaaattcgctaaaattaagttctagcaattgccctttttgcgctaaaacatctgtttgaaaccctgcatcttgtaataaatctttcaaccaagcgcctgtcgcaagaattaatttatcataatgttctttttccccatcaataactacttctccatcagaagaaaaatgcgctctacctgctttgattttcacaccattttcttttgctgcataaagtagcgtttcacaaaataaaccaccattcactcgtgctgcaccacttacataaaccgagccgaatcctgatttaactagcggaaatctttgttttgtttctgcttctgacaacttcgcaacttcacccattacttctgcatcaaggcgtcgttcccttgctaagttaaacagttctgctagtttctcttctgtttgtcgaagcgcgagtacaccgacttgtttatagcccgaatcccgtcctgtatctccttcgagtgtttcggctaattccttataaaatgccgcactattttttgccagctcataccaatatttatttcgtcgtttggaaagccatgggcaaataattcctgctgcggcacgcgttgcttgccctgcctcatctgaatcaattaacgtgacttgtacattttcttttgacaataaataggcggcactagcgccaacaattcccccgccaataattactactttttgcatggttacacccctctatatcaattgtgacacaagttgacttttttataactctttgtaataatatgtgaaaatagttaagtttacaaactactaaaaatcctctacttcattctatccattgtactgaaatccagctttaattacaaaaaggcagattttggcttatctcgtcgtcattaccacatatcctcttagagaatgctttcgcctatcggttggttctttgtactgcgtctcagctaaaaattcatttatttttcattctgcctatattaacagttcagctgattagttatgctgagatatgggagatttttttatgccaaatattcttgattcattatggaacagcatggcgctttttttatcagcgcttttttttcacggaatggcactgcgatctattagagaaaaaaagcctgcttggttccaaattaaatttgcaaatgaatttattaattatgcactgggcatttattacggccttctaggtgtttattttattatccgcggattacccggcacagactctggaatctatacagatatgctacttaatattttaatcgtcctgcatttattttcttcggcaggtccagcaactatcgcgttactacttatcgtctcaggaaaactttttcttggtgatgcactttttgccaatttgatttatgtatttttaattattggttttcactttgtttgcatggaagtagctaaacttcgacttagttccgttcaaaaagtcgttttagttaaacttagtgcgattccccttatgctattttatttacatcaaaaaatacatttagcgtataccatgaatgacttacctgtttggattctctactttttggtttctttttttattacctttattattgtttcagcggcttattatatcgatacatcgaataagttgatttatgatttacaacaatcaactatccttgatccactaacaggtttaacaaacttccgccattttgaaaatgcctttgatgctgcattcaaccatgctacgttaaaaaaatctaatttaagtgtgattattattgatattgattattttaaacgggtaaatgatacatatggccatctagtcggaaatggggttttatctacttttagtcaaatgctcttaaaaatcagcttcccgccgaacacagtgatatcaagaattggcggtgaggaatttgcaattattttaccgaatattaatgtcagcgaaacggagcatttagcagagaaaattagacgaaaagtcgaaaaaattgatgttccgattgtcgcttccggctccgttattactatttctgctggcattgcaaattacgatggtagaaattatccaagcgcgaacgagctattaaatgcagccgaccaagctctatataatgcaaaacgaaatggacgaaaccaagtacatattcgcgaaacagaaccagttatttaagagagtaaaaaggagatgagtccatttgttcgaactagttaattcatacatagatagtttagcgctctttcttgctatcctttttatccaggggatgtcttttcgaaaaataagacaatatcgccctaattggttccaaaatggtagtagacggctttttctttccattctactcggcgtctattatggtttagcgggtatttattttatttatgaaggtgcttacgaaaataatcccgttatttacacgaatatgcggattttgattttgatggtaacaagtgtttttggtggccggattccactcatattcgcctatttagttatgctttttggtcgaattagtttcgatatagcctctcctactactagtcggtatgttattttaatgacactcatttttgctgcttgcttactagtgaccttttggaaaaaacaacgcttttcgagatttgttgcgttgattattttaaacttcccggcgattctttattatttcgtaaataattttgacgaagggcgcattttgcgaggttttgagattatcgagtatttcttgctgttctttgtaactgccttactcgtgttttatgcatgtaactatatcgataaaagtaatcttgttatccaaaatctgactgaaacagcaatgacggatagtttaactaatttgccaaatatgcgctttttcacccagcagtttggctggatttttacgaaatcacagaaaagaaaaaagtcattatctcttttcattattgatattgatcattttaaagaaataaatgattttcatggtcatcaagctggcaatacagttcttgcgcagtttagtagcattcttaaaaatcgaacctttccgccaaggactatgtttgcgcgaattggtggcgaagaatttgccgtattacttcaaaatgttggtaccgagcaagccgctttaattgcagattttttccgggaagaagtggagcgggctaaatttccttataatcccgcaagtggcaaagttactgtatctatcggtgtcgcttctgctagttccaacttttcaacaaccgaatcacttttcgaagctgctgaccaagcgctctatcaagcaaaacaaaacggccgtaaccaaattgctgttcatcagggggaactcgaatgaaacgattcatcctaattcttattttacttatctttatcggcgccggatttttcatttttcttcgaccagagtctaaaaagacagtgagtgcaccaaaagaaaccacacccacttccacctctgttcaaacgtatgtgaaggaaaactataccgcaaaaaacggcttaattatggattataaaaacacggaagaaccccactatctagccgagagcattggactttatatggaatatttagtcgaagtgaatgatagtaaaactttccaaaaacaagtaaatcatttagaaaagtattttatagctgaagataactttattaaatgggaagcaactgattccacaacaactaatgcaattgtagatgattttcgtatcacagaagcactttatcaagcaagtgaaaaatttagttttccttcctataaaaaaatggcagataaattcctaaccaacactaaaaaatatagcgcagaacaaggtgttccagtagatttttacgattttgttcataagaaaaaagcagatacgctccatttaagctatctaaatatccaagcaatgcaacagattaattatcgcgataaagcctatctaccaattcaaaccattaacgccgatccattttttacagaagtatttcaaaacggacagtttaaatttgctgaccaaaaagaagttaatatgattgatcaaatgctcatcgcaatcgcttactatgatgaaaacggcgatatagagccaaatttcgataactttttacaaactgaactagcttccaaagggaaaatttatgcacgttaccaacgagaaaccaagaaaccaagctcagaaaacgaatctaccgccgtttatgcctttttgacacagtattttaacaagacaaatcaagctaaaaatggtaaaatcaccaaagagttattagagaaaatggacacgtcaaatcctgaaacgacccattttttcgattatataaataaagaaataactcttaagaaataacggaaagaagttggacaaatgaaaaagccctccgtacgtgagattattgatcaaaatcactttgatacaatatatgaaccgattgttgttgtagaaaatacacaaattttcggctatgagtcactcacccgcttgaaaacagatcactggaatgcgattagtgattttattgaagaagcggaacaggatggtctgcaaaaagcatttgagctgctcacgcttcataacgcagtgaaacgctttaacaaaagcggagacacgccactatttgtcaatatttcgtatgatacatttttagaaaatcaagaagagttgcacgatacccttcttgataacgggaaaatagtttttgaatttttggaaacatccaagttaccacaagaacgaatgaacgacttagaaaaacaactgctcctattccagaaaaaacacgagactaaatttgctattgatgattttggctccggttatgcggatttacatcgcgtttttgcgcaccattctgattttgtcaaaaccgatcgcttactactacgagatttatttgagagcgatggcaaaaaaatcttctttgagcaacttcataattacgttaaaaagcatcataaatccttaattgtcgagggagtggaaacaaaagagcagctagaattccttcaagaaatcggcattccctatgcgcaaggttattattttcattaagaattaaaaagaaaatctgcttattgtcaggttttctttttgtttggaatcagttgttattcttctttcccccatgtaaaatagaatagaatgaaaaggagtgctgaaaaatgactttaaaatcaggttttgactatatgaataatccattattaaataaaggaaccgctttttcaaaagaagaaagagcaagctatcaattggacggattactgccaccaattatcgaaacaattgaacaacaagccgtgcgcatcgagacgcaaatagaaaatttagaaacacctttacataaacatcggcttttaacaaacttatataatgaaaatcgcaccctttactattatgtcgtaacaaaaaacgtgactgactatttgccaattatttatacaccaactatcggcgacgctgttatccagtaccataaagattacactgcaccggatgaagcattatttgttgatgcctttgcacccgaaaaattaagcgcatcaataaaaaactacgcaaaaaataatccgaatattgatatgattgtcataacagatggtgaaggcgtgcttggaattggcgactggagtgtgaatggtgtcaaaatcgctgttggaaaattagcggtttatacggttgcagctggacttgcaccagatcgtgttcttcctgtcgttattgacgccgggacgaacaacgaaacacttcttaacgatccactgtatctaggaaataaacgcccccgcctttcagaaagtgaatatgacgcttttattgcttcttttgttaatgttatgaaagaagtttttccgaaagccatccttcactgggaagactttggacgcgcgaatgcaagtcgtattctgcataattaccgcgataaaatttgtacatttaacgatgatattcaaggtactggagccatggtggttgccgctgttcttgcgacgattcaagtttcacgcattccattaagtgaacaaaagattattatttttggggccggaactgctggaatcggtattgctgatcaacttagtgcgcaattgatgcgtgaaaccggtctcccttttgaaaaagccaaaaagcacttttatttagtcgatcgaaaaggtttagtgcttgataatatgacagacttaactaccgggcaaaagaaatatgcgcatccatcggctgaatggtctaacgtgcctacagatacattagaaaacttagtggaagccgttcatccaacgatgttaatcggctgttctggtgtcaccggtgcctttaaagagagtatcgtcaaaaaaatgacccagtatacagaacgaccagcgattttgccactttctaatccaacaaaattagccgaagcaactgcttctgatttaatccagtggacagacggaaaagcacttatcgtcactggtagcccttccaaaccagtcgaatatcaaaataccacttatgaaatcggtcaagcgaacaatgcacttctttaccctggactaggacttggtgctcttgtcactcgtgcaaaatatattacagatgatatgctcgctgctgcttcgatggctgtcgctgagcagatttcgccaaacaaagcaggcgcagctcttttaccacatgtgcgcacccttcgagaaacatcgcgcgcagtagccattgctgtcgctaaccaagctataaaagaaaacatccatcaagtcgaattaacgaatgtcatcgaagctatcgagcttgagatgtggcaacctatttataaaggagtttagatatgttctacaaaacgaagcaatcactagatcaactcgtccaaaacggctccactccaggaatcagttatcaaattaaaacgaaccacctggaagaaaataacatcatgggattaaaatccgtttttccagaagcagaaattttgccaagaacaacagaaaacatttatgatatcgcttctttgaccaaagttattgctacgactactcgtattttgcaactcatcgaacaacaaagattccaattaaacgaccctattcaagtatatttaccagatttccagtacaacaatgttacgattttacatttactaacacatagctccggccttgcacaaaatatccctaacttttcaatgaataaccgagaagacgttatgcgttatgtctatgccacaccacaaattaatactcctggaacggtagtcacatacgccgatgctaattttcttttacttggttatttaattagtaaattggacggcaattatgaaaaagccatccaaaataatattttagaacccctgattatgacaaacacaagctttcatcctgtaaataaaaaacaagttatcccaaccgaacttgatcaaacgcgcggtttaattcaaggtgaggtacatgatttcaaggcttggactgccaaatcaggcacaggacatgctggtctttttagtacgctaagtgatctttctaaattccgggatgcgctcatgttacaactcggtgctccaattctttctgaaaaaacatggcaactcatgcaaataaatcatacccctggtctaaatagaagtcgcgggctaggctgggatctccgcggtgagtccgtcttatatcacaccgggttcactgggactttcatggtgcttgatttaaaacgccaagccagcttaattgtcctttctaaccgcgtccacccaagccgagctaacccaaatttcgttgataaacgtgacagcattgtcgatacttttatagaagaagtttcaaacacaaaggaagtttagcatattagctaggcttctttttctgccgttcgcctcccgccctatttcaaacaaaaaactgtattaacacagctgttgaaagccttttctagttatataaaagaaatttattttctttctgattttatattgttttcgttttcacaaaggagtatgctgttcaatgaagaaagattctaaagacttgtttctggctttaagtgaaaaggaacacaattgaaggaggaaattataatgacaaaagcatgggatggttttaaaggaaccgcatggcaagaaaacattagtgtaggacagttcgttcaagacaactacactccttacgatggcgatgaaagcttcttagaaaaaagcacaccaagaacaacgaaactaaatgaaaaaataaataaactggtagaagaaatggatgcaaaaggcggcgtacttgatatggataacgctatcgtatccaatgttgcgtctcacaaagctggttacgtagaccaagaaaatgaagttatcgttggtctacaaacagataaaccattcaaattagcgtttatgccaaatggtggccttagaacagcagaacaatgtttaacagacaacggctactccatcgaccaagaattacatgacttctacgtaaaaaatcgttctacagcaaatgatggtattttcagagcatatacagacgatatcaaacgtgcgcgtcactcgcatatcgttagtggtcttccagatgcatactcacgcggaagaatcatcggcttataccaaaaaccagctttatacggcgtagatcgtttaatcgctgaaaaacaacaagacttgaaaaaaattgccatttcttctgatgaaaatattcgtctacgtgaagaaatttggttacaaatcaaagcacttaaagacttaatcgttttaggtaatgaatatggtctagaacttggccgtccagctgaaaatgcaacagaagctgtacaatggacttacatgggctaccttgcttctatcaaacaagcaaacggtgctgcaagctcattcggtcgtattccgattttccttgatatctacatccaacgcgatttagaaaaaggcattatcaccgaattcgatgcgcaagaattaatcgaacaattaacccttaaattaagaatggttcgttttgcaagaacagatggttataacgaactttacgcttctaaccctactttcgttacaacatctatggctggtatgggtgcagacggtcgtcatcgtgtgactaaaacagattatcgtttcttacactgcttagataacctaggaaactccgcggaaccaaacttaactgtcctttgggatgctcgtttgcctgaaagctttaaagaatattgtatgaaaatgagcgtaaaacattcctccattcaatacgaaaatgataaattaatgcaagaagaaggctatggcgatatgcaatgtatcagctgttgtgttagcccacttaacccagaagcagacaaagacaaaggcgaaacacataacctgcaatattttggtgctcgtgtcaacgtacttaaatgtcttcttggtgctatcaacggtggtaaagatgatcttcacaaaaaccaagtattcgatgtagtagaaccaattacaaccgaataccttgaatacgaagaagtactagaaaaattcgataaatcaatggactggttaacagacacatatgtagatgcgatgaatatcattcactttatgacagacaaatataactatgaaagcatgcaaatggccttcttaccatctaaagtaacagccaacatgggattcggtatttgtggattcgctaacgtagtagatagcctaagtgccatcaaacacgccaaagtaaaaactatccgcgacgaagacggttttgtatatgactatgaagtagaaggcgacttccctcgttacggtgaaaatgatgaccgtgccgatgatatcgctgtaatggttcttaagatgttcaaagacaaattagattcccataaactttacaaagatagcgaagcaactgtttctgttctaacaatcacttctaatgttgcttactctaaacaatgtggtaactccccagtgcataaaggacctgtatttgatgaaaacggtaaaatcgttaaagaaccagaattcttcagcccaggagctaacccttctaacaaagcaaaaggtggattcttagataaccttgcaagcctttctaaattaccattccactatgctaatgacggaatctccttaaccatccaaggagctccaaaaatgttcggtaaaacaaccgaagaacaacatcataacctagttggtattcttgacggttactttacaaaaggcggtcaacatatcaacttgaacgttcttaaccacgacgaagtaatcgaaaaaatcaaagctggtatccctgtaatcttacgtatcagcggctactgcttaaatacgaaagatctaaatgaagaacaaaaaatggaactttgtcaaagaatgttccacgaaaaattaatcggttaaaaattaaaaatgaccaaatctgcgaataacagatttggtcattttttatgcattcgaaacttctgccgcgtaagctcctgccgtatgtccagtcactagcgcacaagtaatattatatccacccgtataaccattgatatccagtatttccccgcagaaaaataatccttccatcaacttcgattgcatctcttttggtttaatttcctttacagaaaccccgccaccagtcacaaacgctttttcaaaatcaagcgtaccattcacttcgaaagtaaaatcttttaataactgaataaattgctcgatttttttcggacttacttgtttatattcagccgtttcctctaagtctgctttttcaagtaaaaacaataacattttctcttgtaaaagcgaacttaacgaatttttcaaggctttcttcggattctcttctaacaatttatacacatctttcgaaagttccgcagcggatacattcgggaataaatcaagacgcatcttcaccgtacctgcgcccgttttcttcaattcacgaaggacgaacatactacaacgaagtgctgctggtcctgacacaccaaaatgcgtgaaaatcatatccatttgatgcgtaataatcggcttcccttttgcatttaaaacagaaagggacacatcacgaagcgacgttccttgtaacactttttgtttaataaaaggctcactggacgtaatcggcacttctgtcggataaagttctgtgatggtatgtcctgcttttttcgcccaagcgtagccgtctccggtcgaacctgtccgaggaacagatttaccaccaactgcaacaattaccgcgcttgctgaaatttcttgaccatctttcagcgtaacgcccttcacatgtccatcctcataatccacttgtttcacggctgtttgcatgtaaatttttacgccaagcttttccatccgctgaatcatcgcctcagcaaccgaacgtgcgctattcgatacaggaaacattctgccgtggtcttcctcttttaacgccacgccaagtctttcaaaaaaacgaataatatcttcattatcaaaggcatgaaacgcactatataaaaagcgaccattgccaggaatatgtttaataatttcttctgctggtcgtctattggttacattacaacgtccgccaccagacataattaatttacgtcccaatttcggtcctttttcaattaatagtactcgtttatttttctctgctgcactgatagccgccataagtccagatggcccgccaccaataacaattacatcataatccattgtcccgctcctttactttatccgtgtttaagtatagcaagcattcgactcagtgccaagcttttttcaccaaacaaaaacctgagaaagctctcaggtttagtttctatattctaatttcgattcatattcgtaaaaataagtagcaatcttagaagttccagtaccgctacggccattgcagcaacataagtcatcgcagccgcacttaaaacttttttcgcttgtggaagctctgagggtgcgacaagtccgccgctttctaattgaacaagtgctcgtttactagcgtcaaattcaacgggtaacgtaattaattggaaaagtacacctatcgccatcaaaataatccctagcaacatgaaactagcaacgtttgcaagcattccgataattaagaacacccaagaaatattggaactaaacattgttacaggaacaagcgctgaacgaaaacgcataaatgcataatcttgctgatcttgaatcgcgtgtcctacttcgtgggctgcaacagctgccccggcgatagaacgaccgcggaagttagcttcagaaagaaaaaccgctttttttcgaggatcatagtggtcacttaacattccatttgtttcatgcacaggaacattcgttaaaccattggtatccaaaatatgacgtgcaacctcggcaccagttaaaccatttgccacgcctactttggaatagtgcgcataggtagtttttacccgatactgtgcccaaagcgggattgccgcaacgataataaaataaataatatactgactaaacgacatctaatcatcttcctcctactactttttttcagtgaatatccttatctcttagtataaattaactaccaccaagactcaacctctttcactcatcatgaggaaattctaatgtaagatgcttattttttatcgttttatcatatacaaaccatagaacgagtactgttaaccaaaatgtcgcataaccaatttccggtaagtatttttctagccccatataaatcggcatttgaccaaatacataatcaatcacatcattatgaaacacccataccgctgcaatcataaaatgccctattcgaaaacgataaaacggcgcataaagaataccttctactgccataaaaccatgcgtcaaaattaataccacagagccccaaactagcactccttgatcaaccatataaaaaatattcatgccgactgcccacaaaccatatttcactaaacatacaaatcctagcgcttccattaaaggccaatgctttttcccaagaaaagcaacaagcgccaaagtgaagaacaaaatcgccgttggactatcaggtacaaataaccaaaaacgcggctctgtcatttgtaattgcggtaaataccatatgtatccataaatcgctccgagtaaattaccaaagaaaagtaatcgtagaaaagcccgatttgcaagtaaactatataacaatattccccagctcccttaaaaaatcctagcacagcaatgaaatgatgcagttttcacatcatttccctactaactaggatttattccttattctttttccgtatccatttgctgtaaaattcgaactaacttatgaaaagcggcttcatcacgtgtatccagcgcctcatcgatttgttgtaatactttttctcttgaaaattggtgcacagattgataaataagcgcatccgccatttctttctcctcatccgcaagcttcactgctgcaaaaggattgtcttcacgaacaagtgcatattcaggtgaagacattgcctcttcaaaatgaagttcaacgtataattcttcgtcccaatttaaccgaatatcatgaaatgctttttctggatcagttgtcataatgttacctttaaaaaataggaacggttcggattcaacaccgtgagcactaagtgaaagcccacgcgcacacccttccaaattatcaacaaaatgaacatattttacaatttgatcatggcccgcaatgtaatttaaaacccacattgcttctctagtcttcatctggtgtttatttaaaaaccagcgaataaaatctttcttctcgtctattgaaatggatgccttcatctttcctcagtcccttcctgtattctttttaattttaatcaaataaagataaaatctctgtgtcttctggctccagttctaaatagttacgcaaaacttcttgtgatttcgcgtgttctccttcttcccttaaaaataaaccatattcctttaagaaagtaggattgtttgtaaagtgcgagtaagccagttcataatttgcttttgctttattatattgttctgtttcctgatatgcaacacttacgtcccagaaaatttgtggttcagaaataacttcttcaccaagcccttcgaccaattcgatgaccccttcatagttttcctgcgcaattaataatttattcagctgcataatcgcttccgaatattcctcatctagcacaatcgcctgacgataaaattcttctgcttcttctggcaaacgtaacttaacagcgagttttccagcttcaaggaacatttctttattaaattcatcttgcatcaaaccatctttgagtaccgcaatcgctttttccggttcgccattctcttcgtaacttttcgctaagtaagaatagagcgttgtgtaggaagggtcatgttcgcgcaaatgttcaagtgcatgaattgctttcgtgtaatctttcgcctggtatgcagtcaatcccatcccgaaaagcgtatcaatggattctttatcttcaagtgcccgctcatagtaagataatgcttcttcaaatgccccactagctgcaaaagcttcggcgatacgttcatatacagacaccgcaccattcgaaataattgttaatcctgcctctacagccgtttgataagactgcactgcggacgcgaatcttgcctgcgataaataatattctccaagcgcaaaatcaataatcggttcatttggcgcgatttgtttcgcttcgagtagtttctgctcacttacttcgaataagccttgcatctgatataaatcagctaacacgagcaaactttcaatatatgcttcgtcttctttatttactttttctaaatagtcttgcgcagaatcaatatcgtctttctcaagtgcgacctcagctgcacggacaagtaactcgccttcatccttgtattttgctaacagaagttcgtacaaatcttccgtttcatctaaaaagccgagtgtaaacaattcttctgctaaataatattgttcttcatctgttcccgcttgcactacttcatcaaaatacttcttcgcaagcgccatatcttcatgctctaacgcatgtaacattttattagctaattccatttctgcaccttctttaataataagtcgtttttctattataccattagttcgcttataagaaaaagtgattgcctctcttaaataaaataccagcgctgatgtgattagcatacagcactggtagaagttgttattttaatagtgaacgaatatcttcaaagaaagttggatacgaaacagaaactgcttctggacgttctaattccacatcgccttcctcgacaagaagtgctgcaatttgtagcatcatgccaatacggtgatcaccgtaacttgttacattggccgcatgaagtggtgttttcccgtggataattaggccgtcttcggttggtgtaatatctgcgcccattttgtttagttctgttgcaaccgcatcaatccggttcgtttcttttacttttagttcagctgcatctttaataatcgttgttccttctgcttgtgttgctaaaagcgcgataactggaatttcatcaattaaacgaggaataatatcgccatcaatttctgttccttttaacttactcgttttgacaacaacagtgcccgctaatttcccagtacttctgctggaatctttgacaactaaactgccacccatttgcttaaccacatcaaaaattccagttctagtaggatttaagccaacatgagttagttcaatctcactgcctggcgtgattaaaccagcaacgataaagaatgctgcggaggaaacgtcgcctggcactgtcatttcttgcccggtgaatttttgaccgcctttgacgcgaatggttaagccgtccatttcaatttcaccaccaaattggcgaatcatatgttccgtatgatcacgtgttttttctttttcatggataatcgtttcaccttccgcttgcaaggctgcgaaaataattgcacttttcacttgtgcactagcgactggcatatggtattccattcgttttaatgattgcttccctgtaatcgtaatcggcgcaaattcagaaccatctttaccatgcatttttgcccccatttgttgtagcggcaacatgacgcggttcattgggcgtttcgcgatggattcgtcccctaaaataactgtatcaaaatctcgcccagctaaaatacccatcattaaacgaattgtcgtacctgagttaccaatatcaagtggaccatccgcttgtttcagcccatcaaaaccagtgccatgcacaataatttcttcatccgtttcttcaattttcacacctaatgctttgaatgccttaatcgttcctaggcaatcatctgcacgtaagaaatgacgaatgaccgtttttccttctgcaatggccccaaacataatactgcggtgggacattgatttgtcgccagggactgtgattgcaccaaccagcccttgtttatttgtaattaatttcatcgtcatttcgctcctattcgtaatggcatgtatagttacttcgtgtttcaatgcaacgcttcgcccggtccctgtcttcatccgattggaaagtaatttgtaacacaccgaaaatatcttcacgtgtttccaaaatcttgatgttcgttaaactaatttcttcttcgcctagatacctagtcacctcagagataaccccaggataatctggtacgtcgacaaataaatcgtaaaaagatggaatcgcaccgccttgatgaactggaagtgaatctcgaaattcttttgccccatcaaaaaaggcgtaaatagaagtcgcatcttcactttcaagcatctcaagcgcttggttcatactatctcgccaaatcgtcagctgtttcgttaacgtttttttgttactaatagatatatccgtccacattcttggatcagacgaagcaacccgtgtaatatcacgaaatcctccagctgctagacgaaatgcggcaggatgttcttcagtaaaactttgcgtctgattcactaaagcggctgccacgatatgcggtaagtggctcaacatgccagtaatttcatcatgttcatttggtgataatactaagaatttagcattcgtaccagacagccatgtttttaggtcggtcacgttgtcttctgtcacgtcttttgttggtgttaacaaataataagcattttcaaacaaaagttctttggcagcacggacgccacttttatgcgaacccgccattgggtgcccgccaatgaacgtaataccactttctctgagcgctgtggatgcttccatgatggttccttttgtactacctgtatccgtaacgataacattttcctttaaacgtagccctggtaaacgcattaataactgttctgtttcttttaccggacaacagaaaattagtaaatccgcttttggtccatctattaaaatactttcgccaatttcgtcaatgacaccgagagactttccaacttctaacgaatgataggaaacgtcaattccgatgatatgtgcttctgggtgtttggctttaatcgcaagggcaatagaaccgccaattaacccaagcccaacaataactatcgtccctttcattcaaaaacgcctccaaacacttacaataatttttctaaaagtgcaattaccgcactattttcttcttcttttccgattgtaattcgaacagctgttggaaaaccaagtgcagcaccagaacgcgtaatatagccatttttttccaagtagctaaaaatagttcttgcttcgattcctaaatctattaaaacaaagttgccattcgctggatatagttttacttgttcaaaacgtttcgcaaacgcttcgtattgtttaattccatttgcattagaaattctgcatgcctcaataaaagcttgatccttaattgcttcaatagccaatttttgaccaatgctcgtcgtgttaaacggcggacgtacaatattaagttgattgatgatttctttatccgcaatgccataaccgacacgggcacttgccaaaccataaattttactaaaagtccgggtaataattaaatttttataagtgcgaattagtttttcgtgtttcttaggctgtggtgtcacatattcaatgtatgcctcatctaaaacaaccagtatatcacttggtactttgtctaaaaacgcttgaatatccgctaaatcaatataattcccagttgggttattcggattacaaatccaaacaatcgttgttttttcatcaatcgcgtttaacataccttctaaatcatgcgcaccgtccgtaagaagcggaatttctcttacttccgcgccttcaatcaacgcattttgacgatactgcacaaacgtcggtgttgccatgaccgtatttttcgtcgtatcaagcaaaacccgtgtcaatagctcaatcaactcatccacacctgctgtaaaaatcaattcctcttcttccaattgataaaagttagtcacttctttgcgtaagctagaagcccaaccatctggataaatttctgtttccacgttagaatttgcttgaagagccgccacttttggagaagttcccagtgggttttcgttggatgacagtttggtaattttcgttaaaccaagttctgccatcacttcttcttcgcgtttccctggcttataagaagatagacctgcaagagattttttccatttcattacgcatccccctctttcactaaatctgggcgcaatacttttgctccgcgtaagtaaacatggttaatcgctccaagtggcttatgtaaatctgtgaataccatgaagcgaatgcacataggaagcgaattcggcaccggaatttcttgcatccccataacaggcactagttcaaatccaggtgtttcacggacagccttcgctggaaaagcagcagaaatatcttctgtcaccgtaataattaccgatgtaagttgctcactattcgtgacttcattctgagttaaaatttcttcaaataattctttcgtcgctgcataaatttcttcaggtatattagtttctattgtcgttgcccctcgaatcgctctcaaatgacattccctccctttcgcatcacacgtttatatgtttcaaaaatcaaatcatcatctgctttaaaaataactggtttaccaatttcttcgagtaaaaccatacttatttcattaaaagttgtttttttatcatgacgcatattttccagtatcttgctaaatggaactgaagcgtcaaaagtggtatcatagcccaactgttctagccaagttttaaattctgctaaatcgaaatccagtccgtaaatagtctcactcatcgtgagcgcataaatcatcccataagtaatcgcctcgccgtgtagccatttaccaaagtttccataagcttctagcgcatgaccaaatgtgtgaccaaaattcaaatacgcacggacgccttgctcggtttcatcttgcgcaacgatatttgccttaatttcaattccgcgttgtaaaaatggcgtcaaatccttcgtataaaagtctttcggctccgtaaaggtatccattaaagcacgtaataaagtcaggtcactaatgagcgcatgtttaatcatttccgcaaaaccagagcgcaattcccgttctggcaaagtagcaaaaaactgcgtatcataaatgactgcttctggctggtaaaagttaccaatcatatttttgccaagtggatgattgatcgcaaccttgccaccaaccgcactatcatgcgcaagaaccgtcgtaggtacttgataaaacggaattcctctcatgtacgtagcggccacaaaaccacctaaatcaccaataacgcctccaccaaaagcaattaaaaccgctttacgatcaagacctgtttcaatcatttttgtcatcacgtcttcatacacacggaacgttttcgcttcttcgccgtttggtgccacataataagtgacgacaggtaaatcagcgagaaccgcatcaagtttcgctttatgaagttccgccacgtgtccgtctgttaagacaaacacgtgagaaaatttagcaaggctctttgtccatttttcgcggatgtcttctaatgcgaattcattaatatatactggatatgttttacttttagcacggactgtaatttctggcatgtttaaaactccttcgttaagtttcggtgttcctccacatgttttttaagcgtatcaaaacgatcaccatcaaatttttctaaaacagctactgcaacttcccaagcgacaacagcttcagctactacgcttgcagcaggtactgcacaactatccgaacgttctacacttgcattaaacgtttcttttgaatcaatatccacgctttgaagtggtttgtataatgttggaattggcttcattacgccgcgaacaacgattggcataccattggtcattccgccttcgaatccaccaagattgtttgtacgtctagtgtagccatcttctttactccataaaatttcatccatcacttcgctaccaggttttctagcggcttcaaaaccgacaccgaattcagcacctttaaatgcattgatacttacaatcgcgcgagcaattttcgcatctaattttttgtcccattgtacgtaactaccaagtccagctggcacgccgccaacaacaacttcaacaattccaccaattgtgtcgccatttttcttcgcgtcatcaattttttgcatcatttcttctgcagccacgccgtctagacaacgaactggggaagcttcggatgtttcttggatttctgcaaccgcgtaatcacgtgttaaattcgcacgcgttccgccaatttcaagtacatggccggcaacttcaatgccaagttcgtgcaatagttttttcgctactgctcctgctgccacgcgaacagtcgtttcgcgcgcgctagaacgttctagtacattacgcatatcgttatgaccatatttcatgccgccaaccaaatccgcatgtccaggacgtggacgggatacgcgacgagacttttcatttttttctggaactggttcaatgctcataaccgtttcccaatgcttccagtctttattttcaacaaacattgctacgggtgcgcctaatgtttttccgtgacgaattcctgccgtgatttgtacttggtctttttcgatacgcatccgcgccccacgaccatgcccaccttgtcttctttttagttctttgtttacatcttctgctagtagaggcattcctgctggtaacccctcaataattgttgtaagccccggtccgtgtgattctcctgccgttaagtatctcatctgctcatctctcctttttctatttcagctagattttctagcgtttatattttagcgctttaaagtatatgtgtaatatcttaacatatgagaagctagaacacaatactttcgtttcattctttcatcttaccaaaaaacggcattaaatggtaatttctctatgaaaaaagagcctaggtttccctaaactctatactatgctaaatccaagtgtcgactgctttttgatagcttaaaatttcgtccggtgcaaaaaacaactgaatttcccgctgcgcactttctgggctatccgatccatgaatcacatttcgatttgtatgtatcgcataatctgcacgaattgttccggggtcagcttctaacggatttgttttccccatcatccgacgtgccgttgcaatcgcatcgtctccttctagcaccatcgcaaacaccggccctgaagtaataaatccaattaaatcctcgaaaaaagattttccaatatgttccgcgtaatgtttttctgctagttcgcggtcgatttgcattaattttccagcaactatttttaagccttttttctctattcttgtgacaatttcaccaataagtcctcgttctacaccatccggtttaaccattacataagtttgttccataaagaatcctccctcacgttaataatttcttttatctaaaacacgaacgatttgttttaatggttttaattcaggaacttgcggcaaagaatctaatatttctactgctttttttaagtaggttgttgcgacatcttcggcctgttttgctcctgtttttttgacttcttccactaaaacagcgatctcttctgctggagtttcctctgtaatctggctgatgcgttttttaagaaaaggatcttccattgcaaaaaatactggcaacgtgacattcccttgtcttaaatcttctccagctggcttaccaagttctttttctgttccaacaaaatcaagtacatcatccgtaatttgaaacgccatgccaacataataaccaaaacgatataacttctgataatcggcttcactttgaccagaaacaacaccaccgagtccgcaactagctgctatcagtaaagctgttttccgtttaattcggcgtaaataattacgcacactttggtcaaaattatatttatcttttaattgttcgatttcacccgtcgaaagctccaccgtaacatgtgataacattttatgcgctgcaacatctttaatttccgtcatatactctagcgacttggcaaacaaaaagtcacccgtatacattgcaatatggttgccccactttgatttaatcgtctcgcgtccgcgtcttaaatccgcatcatccaccacatcatcatgcacaatcgatgccatatgaattaattcaatcgccacactggcgtttttcactgcgttaaaatcagcattagcagcaagacgtgcggataaacaaacgaacatcggtctaattcgttttccaccagcctctaataaatgaagtgccgcagcggaagtagtgtcagcagctgcgccagaaagagcctttttaagttctttttcaactgagtcaatgtctttttgcatatttgcatataaaaagttaagtttcatgcttgccaccttattgttccttctttttaaatccaaagtgggttgcacttgcgccgccactgtgtgaaatatatcttacgtatgaaaatccggcttcttgaaacatttccgcaagtcgtgccattcctggaaactcacgcgttgattcctgtaaccagctatattctttataacttttcgcaaaaaatttcccaaaaacaggcatcacgtaacggaaatacgcattaaatacttgtttccatccaggaatatttggttgcgacgtatcgatacacgcaagctgtccacccggttttaacacgcggtacatttcacgcaacacttgcatataatccggtacatttcgaagcccaaaaccaatcgtcacataatcaaaactattatccggaaaaggtaattccattgcgttcccgtgaataagttccacattatgcaaatccgcttccttcactttctcgcggccaactttcagcatgttttcactaaaatcaagccctgtcacatgaccttctgggccaatttcttccgccatcataatcgaccaatctgccgttccacagcaaacatcaagaacattcgtccctttttgaacacgcattagcttcattgtttctttgcgccatttcacatgtagtttaaaactaataacactattcattcggtcataacttggggaaattttttcaaatactttatgtactttttcttctttagtttccgtcatatcccgaatctccttctatttatcagtcgttaataacttcgatgattcttttttctagtagattagaaagtggttcagcttctgtttttagtcgttccacttcacttttcacatcacgaataatcgctactaaccagctttcaaaattagatacagcttcctttgcaaagtagccatgatcaaacgcccgcttcaacctagacgcaccaatttccttataagtagcaagttccgtttgaagccttttgagtaaaaagaactgacaaccaagcgcgataaatgtttcatctttcataaagtacttagcaaatttggcaaaaatagccgcattcgtcaaagtaagctgagataaatattcttcatccgtcgctacatgtaattggtaaatatttgtttttgccgtgtttgtttcttggacaccactttgcaaagcacggagaagtggaatcatttctaattctgcaagcgtgcggtaatagagagcgctataaaaatcaccagcaagaactgtcaactcttgttccttacgtgtcagctttacaacatcgcctggttcatcaattttttcatgtgtatcatgcgctaaaatcatgtacagcgttgcactaacgacgcgataagctgcagcatcagtcaaatcagagccagaaattgcttcatgaagaaagagcatttgatctttgtccatttgcccgccttcattattctcttgtaaatattgatagactgcttgctcatgtaccaactgctccacttcctttagcccagcctctcttgcctgataagtcatttaacaatcccctttgaatctccttattatgtaaaataaattataccataaaggatatttaattatgcttaattaaagccaaaacttcacttctaagcttatcgtcatttttaaaagcaccacgaacagcacttgtaattgtttttgttccaggtttgttcacaccgcggatagtcatgcacatatgctctgcttccatgatgaccattacacctagcggttttagtttttccatcataatttctgcaacagtcgttgtaatccgttcttgtaactgcgggcggcgactcacatcatccactacgcgtgcaagtttactaagaccagcaactcttccattttgtggtaagtatgctacatgtgctactccgaaaaaagggacaagatgatgttcacacatagacgaaaagcgaatgtctttcacaagtactaattcttcatgttgttcttcaaaaatagtatcgaaatgaacagaaggatcttttttcagcccggcgaaaacttcttcatacatacgagctactcgcattggtgtatcaatcagtccttcacgatctggattttctcctactgcttctaaaataacttttaccgcatcagcaatcttttgtttgtctatttgctccatccttaattcccctatctttttagcattatataccttgtatatcttaacacagccgaacttcaaggtaaatttaatttgcttgaataagtgataataatagggtttttttgctttcgtaattatattccctatttctaaaacagaaaaccactaaaaatgggcataaaaaaactagcctagcttaattataaaattaaggccagactagagttagtgcttaaaagtctatgtagcttatttaacagcttctttaagcgctttaccaggtttgaaagctggtactttacttgcagggatgtcgatttcttctttagtacgagggttacggcctttacgggcagcacgttcacgtacttcaaagttaccaaatccgattaattgaactttttcacctttagataaagaagtttgaatagtttcgaatacagcttctactgctttcgctgcgtcttttttagaaagatcagctagttcagcaacgctatttactaaatcagttttatttgccattgtgttttcacctccttcacagaataatacaaaataagcaggtacaagatatacctgtatttctctttttttccaaaaacaaaaatgaatttggaaatctaaggagaatcatgactgaaatggcttaactacaagccttaacagtaattctgataaaagattatcacataatccctacaactgcaaggaataatgccaaactgacaccgtttcttaacattttcaaccacaaacttttttctttaaatgcttgaaaacgtgatagtatcaacctgttatccataatactaacttggaagccttagaatagcaagcgataccaccacaattagctaaaatagttcttttttcataaaaatatgtgtaaatttgcgtctattacctgaaaactctaggtttctgagcctagttttattctaacatttctttttggaaagctgctttttctgtcgcagtaattccaattcctttttctaaataattagctactgatccatattgttttttcatttcatcaaaggcaatttccaaatattcaggacgagcttctgccatcggccggaacgtttctaaatcgattttttcggttccactcgaaaagagcgacacgattcctcccatttcttgtaaaatgtcgtcctggtagcgattagtgatggcgtaatcgtcgaaaatcgttttttctggtacatctaacaatgttagtaataatgcccccaggacgcctgtacggtcttttcctgcagtgcaatggaaaacgaacggcaagcctgcttttgcatcttctaatacttctgtaaagatttctctaaaaccttccactgattgcacaaacacgcggtaactttctcccatcaacggttcataaatagttgtatcatttgttaccggtagctttgtttcttcatttttggcagtgccaatgggaatatgtttgttcagtataccttcaattgctggtgttggttgtgctttaacttccgaactactgcgcaaatcacaaatccattttatatgtagtttttgaagcaatgctgcatcgttctcattaatattcactaaattagaagagcgatacaacttcccccatttcacatgcttaccgtttttggatgcataaccgcccatatctcgaaaattgaatacactttcaagtggcaaaatgcgttcagaaacaatagctttatctccgtttggtgtctctaaaaagaaataaataggaatatcctttgtgtcatatgaatagtgatcaacatcatttgttactttgaaaacgggttcactatttgcttctagtttaggactactacttacaaaaaccactgtaccttcgctgacttcttctttgttccatgttaatgttacggctttatctgtacgagtaacttccatattttccacctactttgtattatttggcttttctgcttcattttagcatatttcacaaaaaaagagccaaaataagcgaatagcctatcttgactctttctattaaaatgattctttttcgattttcttttcgcgacccattaataaatcaactgcttcgcgagcatctttattttcgaataaaatcgcgtaaatcgattcagtaattggcatatcaatatctagttttttcgcccagccatgtactgctttggctgttcgtacaccttcaacgaccatacccattttttctaatacttcatctaaattctcgcctttacctagcatatttccagctcgccaattacgtgaatgcacactagtgcaagtaacgattaagtcaccaataccagtcagcccgtaaaaggtttgtggattagagccaacagcaacaccgagacgagtgatttctgccattccgcgagtcattagtgccgctttggcattatcgccgtaaccaaggccgtcagagattcctgcgccaagtgcgataatgtttttaagcgcgccaccaatttctgcaccaatcacatcatcattcgtataaatacgcaagttattattgatgaaacgatcttgaacaatctcagcagctgataaatctttacagctcgcacaaagtgttgttggatgacgaagggcaacttcttccgcatgacttggtccagaaagaaccacaagtgctttacgtttagctgcatcaatttcttcctcaatcacttcagacattcgaaggtttgtttctggttcaatacctttactcacatgaactaaaattgtgggttcttttagcgcttcatttaactgcttacaaacgatacgcatcgcatttgttggaatagcaattacgacaatttctgcaccatcaatagcttcatcaagtgacaatgtcgcttttacctcagttggtaaaataatatctggcaaatagtgactattcgtgtgcgattcgttaatttcattcacaattttatctaagtttccccaaataactggtttatgattattatcagctaggacaagtgcaagacctgttccccaacttccagcgccaagaatagctacttttttctgtgtcattatatttttcctcccgaaaactttacttacgcttacgagcaattactcgaattggcgtaccctcaaatggaaatgcttctctaatccggttttctaagaaacgttcatacgaaaaatgcatgagttctggatcattaacaaatacaacaaacgttggtggttttaccgccacttgtgttgtatagaaaatcttcagtcgtttacctttatccataggtgatgggttcattgcaacagcatcactaataacatcattcagcatacttgattgtacacgtaatgaatggttatcgcttacttggttaataagtgggaatagattatttaagcgttgttttgttttagcagatacgaaaacaattggtgcatagcttaagaattggaattgctcacgaatatcttctgtccatacattaattgttttttcatctttgttaattgcatcccatttgttcacaacaataataattgcacgtccggcatcatgcgcatatccagcaattcgtttatcttgctcacgaataccttcttctgcgttgataaccacaagaacaacgtccgagcgttcaattgctctcattgcacgtaaaacactatatttctctgtgctttcatacactttcccacgttttctcattccggctgtatcaatcatgacataatcttggccatcgaaagtataagttgtatcaattgcatcacgagttgtacccgcaatatctgaaacaataacacgatcttctccaagcagtgcatttagaatagaagatttaccaacatttggtcgaccgattaaactgaatttcactgtgtcatctggatattcttcctcttcttcttttggaaaatgagcgcgaacagcatcaagcatgtcgccaagccctagtccatgtgaaccagaaattggatacggctcaccaaacccaagagaataaaagtcataaatttgatctcgcatttctgggttatctactttattaatcgctaaaacaattggtttattagaccggtaaagaatttttgctacttgttcgtctgcatcggtaactccttcacgaccattggtaataaaaataattacgtctgcttcatcaattgcgatttccgcttgtgcgcgaatttgctctaaaaatggttcatcggaaagatcaataccacctgtatcaataatgttaaattcttttccaagccattccgctgaattatatatgcggtcacgtgtcacaccgggaacatcttccactatggaaacacgttcaccaacgattctgttaaaaatagtcgatttgccaacgtttggacgtccgacaatcgctacaactggttttgccattatttcaccttcttttttctcgaatcctatttatcaaactttctttagtttatcagtaaaacagcttactggcaatgaaaagttcgatttgaaaaagaaaaagagcctataggaacaatctccctaggctcttttgcgtactattatttatcgtcgttttgaagaccttttaatttatcaccaattaaatcgctcatttggaatccagtattttcttctggaagttcataatcagcctcttctactggagcatcttgtaattctttgatgcttaatgataaacgtttgtctgcttcgtttacttcaagtacttttacttccacagtttggccttctgaaagcacttcttgtggtgtcccaatatgttcatgggatatttgagaaatatgaaccaaaccttccactccagggaatatttccacaaatgcaccaaaagtaactagacgtactacttttccttctaaaacagaaccaacttgcgctttctcagtaataccgtcccatggtccaggtaaagtcgctttaatagaaagagaaatacgttcattttcagggtcaattccaataactttaactgttactttttgaccttcctctaagacttcttgtggtgttgcaatatgtttataagaaatttgcgaaatgtgaactaatccgtccacgccaccaatatcaacgaatgcaccaaagttggctaagcgttgaactgtaccttcaatcacgtcaccttctttgatttcgcttagtagcgcttgcttttgactagctttttctgtttccacaactgcacgatggcttaaaattactcggttattttccggttcaaattctactactttgaaagtaagagtagttcctttgtaatctgcgaaatcttccacaaaatggtcttctactaaagaagctggaacaaacgcacgaacaccaaggtcaacaactaatccacctttaacaacatcactgactaccgcttcaaaaacttcaccagattcgaatttagctttaatatcatcagatgctttttctgcatccacttttcgtttagataaaacaagtatatcgtcttctacttttgtgacaatcaaatcaagtgtgtcgccaacgctcacaacgtcagaagctgtctccacatgtatattggaaagttcacttattggaacgacaccatcaagtttgctacctggaataccaacataaacttgtttatcttccacgcttgtaactgtgccagtgactttgtctccttcttcaaaatttctaacttccacatcaaataaatcttcagacatgtgtagccctccattcgttagtcgaattttaggaatttctaattcagaagcaaccttcactcttgcttcatctgcttgactagttttcctagataggcaaattccgattaaataaagaaaaatatcaaatacaccttctgtaaaactgatcttccagctagaaaatcctttcaagatacttttcacaaagtaaaaaatctctcttataacatcctacaaatccagacatttgtcaagctcttttaagagggcggaaatgcctacagagcgtgaaatcgcttcgtttgtttagcctttcacggttaaattaaaaaagtactacatttccatttagttaagaaaatgtagcacttttttgctaattattaatttttagttctgctagtgaaagaattttattggctacttgatcaatcgacattgatgttgtatccacttcaattgcatcgtccgctttttttaacggtgagtgtgttcttgtataatctaaatgatctcgctcttcaatttcttttttgagttggtctagatctccagtaaaaccttttgccatgttctctttatagcgacgttctgctcgttcttctacacttgcaagtaaaaatatttttagttcagcgttaggaagaactgctgtaccgatatcacgaccatccattacaattccgccttctgtagcaaaaacttgttggcgttcttgaagtgcttcacggatagatgggtgtgcggcaacgatagatacatgattggtcacttctatagagcgaatcacttctgtgacattttctgaacctacaaatacttgttgtacttcgccaggttcaaaacgaataactgttttttggagtaaagctgctatagctttttcgtcttcatatgcgatgttattttttaaagcgatataggttactgcacgatacatagcacccgtatcaatatagacaaagcgcaatttttttgcaacgatttttgccaccgtactttttccagctgcagccggcccatcaatcgcgatacatatctttttagtcataaaataaaactccttttatctgaaattggtttgattaatttcttcttgggatgctaaaagtaccattaatttcatccgcgcttttttactatcgtaatcttttcctaaaataacgccacgattatataagtcaaacgtgctgccttcataatcatatgtagtatatacatttccttcttccgcacttgttgtgatgacaactggaattcccgcatctaatgctctgataatagctggcatcatttttggcgccacttgcccgcgtccaacaccttctaaaacaattcctgaaacgccactatcaatcgctgcatcaataaacaaaccgtctgcgccaatataacatttaatcacaacaacttctggtaaatcaaggcgaatatcaaaacactcatgctccagtggtttttgatacaggaaaacttgatcattatcaatgataccaagataaccaaacccaaaagcactaaaaccttgtatgttagatgcatggacttttttgacatatctcgctgcgaaaattcgttcattgaaaacaacgactgttccagcttgacgtaaatttatttcacatgctgtataaattgcatgacgaatattaacataggcatctgttcccggctcctcaggtgctcgctgagatccagttactacaattggtcgtgcatcggttactgcgagatcaagaaaatatgctgtttcttctaatgaatctgttccgtgcgtcactactattccatcatatgtttcatccatgaagatagattcgataagttgcttcagactgattaaatcaggtagcgtaatatgcatagatggcaattgaaaagtagaatagatatcaatttgaatttctgttggtaattggcataatgcagctaattcttctccagataattcacctgatgcaagttttcctgatgctgttttcttacttgcaatcgtaccgcctgttgtaattagtgctacttttgccatgattatttccccctacattttccatttaaacaaacaaatgagtctcggaagcgtttcccagacccattcagtgttgtttattactgtggaattgttagaactgtaccaactggaacattgtcacttcctagtccattggcttgtttaattttttctactccagcagctgcccccgcttgtccatatgttgaacgcgcaatactataaagggtgtccccagctttaactgtatgagatcctccagctttttgctgtgaagcttcattcgctttttgttgctcagctttttcagcggctgctttctcggcagcagctttgtcagcagctgctttttcttctgcagcttcttgttctttttttgcatttgcagctttcactgcatcttcttcttgttttttcttatctgcttccgctttttctgccgcagctttcttctcttcagctgccttttcagccgcagctttttcttctgcagcttttttcgctttttctttttcttctttagattgcgtgttgtcagatacatttacggttgattctgtttctgttttcacttcatttgatgaacccatattttgtactgttacaaatacaatcacgataacgattggtattaatagaaaaaacacaatcaataaattaagtaatgggtatctaaaaatggttttcttttttcctcttctgctatcagaacgggataacattggcggttcattgttgaattcatcttggccttcagaactcatgtcataatcagccggttcttcgtattcccgtttttcttttcttgtttttaccactcaaagttcctcctttagtgctttctaaacttatcctatgcactattattggcacagagaagtgttacatatgatgttaataaatgaaatacctttgaaataattatacccataaacacaacatacaacaacacttaaaccacttttttagaaaaaaaagcaagaattattataatttagtacttctggcatagaatctatcttgattttatacagattactgaacaaaataataacaatttttttacttttaaacaagtctttttttcacaaaaaatgtgaaactacatagtttttgtcaaatttcgtaacagcaaaactattgcagtaaataagctaaataagcttcccatgttggaatttctttttgttttatttttgctcttttttcaaaattgattatttccgctccatccaaatcacaacagttttctggggtgacttctaacggggcttcttcaaaataccgtaaaatataattacggcgacaatccgttgtatgcagatacccaataaattgttgtaaattagctcgcttccatttttttcgataatccattttatcggttaattctttcgtacttaaaccgcttctttggtagtaatcgataaaacgttgctctgtttcaggtaaagttttgcgttgttcagtcgtcagattcattaagttggcatctgggatatcttgatctgctaattgcatttgaatgaattcatctccattcgcatataagagaatcgccacactgtcttcgccatcacgaccggctcgaccaatttcttgtaaatatgcttccaaatcagcaggcatatgataatgaattacatagcgaatgtcggctttatctatccccattccaaacgcgctagtggcgcaaattacatccagttgcccataaacaaattgttgttgaataataattctatcttctgtatccatatccccgtgataataggctactcttaattcagcaatttcgcttaattcatgcgcagtgctttccgctaattttttactagaaaaataaataattcccggtgtttgtagtttgcgaacaagctcatataaacggtcttttttcacatgctggttagaaaatttctccacttgtaaagaaatattcggtcgattaacagaataaacgatttgcgcacaatccgttagatgtagttgcgttaaaatatctgctctaactttcttcgttgccgtagccgtaagcaccatagtgacaggaaatttggcttcttgaatgaacctacctaacatcaaataatcagggcgaaaatcatgtccccactgagaaatacaatgcgcttcatctatgacaaataagctgatcttttgttttaatagtaagtttttcaccgtttcattatttagcatttctggcgataaaaaaataaatttatatgaatggatgctcgcaaggatttgacctttttcttctcgttttaaaaagctattaagcgccgctactcgcttttctccgtgagcgcgcattcgctccatttgatcctgcataagggagagaagcggagaaacaatcaatactaatccatccatcaaatgacccgctaattgataacaaatggtttttcctgttccagtaggtaacatagcaaaacaattttgctttgctaaagccgtttcaattacttctttttggccaggacggaactcatcaaaaccaagatattcttttaattccttttctaagttcactgctcgccctccctactaacaactgctaaccgaatttgatagtaatccaaatccggaaattccgcttttatttcacgcagtaaattccatttctttgtaataatcgtttggatgattgcctcttctggtaaataaggaacattcgcttctttcaaagtagctcggatttctacaaagtgatcatggatggtactctttttcaaattccgaattcgctcgattgcttctaaatcagctccattttgccataatacataggtttgcatggcagaactagttaatccattgagctcatccggtacaagactagctagaatcggccattcttcgggcttctttttcatctcagtaagcaaacggtgaacctcatggagcacctcaaaataaacgtcccacttctccacttggtattttgaggcaatttgttctgttgtatagcccattaattcgcccccagaaaaacgttccactaaaaacgctggccgagcaactgctaatttgttcatccatgcaaagagttcaccgtataacttatccgctaaattagttttatcttggtacttcaaccaatgcttaataaattgttgggctttcttatcacgaataactggtaaataatagctttcatgatgatgaatgttactaacaacttgaactgcgagtcgcaaatgggaaaaaaaagcaaaagcttgccgttgaaatgtaaaaccttgaaagtttgggtagtcattttcaaacgtcgctactagttgtccttgtgtcacataaccattttcagtagaaataatgctaccttggtgcactaattccaaaagtcgtttttctaaatagtttgcttttaaatttggcactagtccaaataaatgttgcatttgaaaaagatggatatcttgaacagcttgtccggttcttcttccagctaaaacagtatgtaaaaatggtaattttctaggtgtaatacttttttctaaaattgtcacaatatagttatccagcttatccaagacctgcccaccacctttttttgtaccataatcataacacagaaacacttgttctacattaatttttccgaaaaaaactttttcaaaatatggtacaatagaaaaagaaaaaatctggctgcaaatagttattttagaaaggaagcgtagaaaattgaagtattgtcttgtcgaaaaagacacttgtattgcttgtggcgcttgttccattcacgcacctgatgtttttgattatgatacagaaggtcttgcctttaatatattagataataacactggaacaaaagagattcccgaagatttggtcgaaatggtgattgatgctgaatttgcttgtccttctctttctatcaaagtttctgatagttcgtttcattaaaaaatccggaagcctacttataggcttccggatttttatatttaatggcttatttcttgttgtcttttttcaaatttgcgccgttctttcatcgtttgatttttagcaatccattttttcaatctggagtatagtaataagaatactgcgctaacgatgactccttttaacaggttgaaaggtacaatcgcatacgtgattaaccaagcaacatctgtatttgccggaagtccaccaagtttgatgtaaaatggtaataatacaaaataattaaatacagccattgcacctgtcattaaaactgttccgacagccgtggaaagaaccatgccttttgttgagcgtaaccagtggaataaataataaataggtagtacgtaaaaaagccccgatataaaattggccagctctccgactggaactccaaccggactacctgacacgatgtaaagcagaacatttttgattaattctactaaaatcactgcgagtggtccgaataataatccaccaatcaaagctggaatatcactgaaatcaagctttaaaaatggtgcactgggtagtaacggaaattgtagcatcattaaaataaatgctaatgtgccaagaaccgccacacttacaaaaactttcattgaataattcttcattgtcatttctcccttgatgttcaccaagaagcgagtgacgtcgcttaacgaatgcaacccaagcaaataaaaaacctcaactaaaaaaagttgagggagagtttgtgcattaataaacaagcgctagatactcaaataagcatcacaacttgccaacacatgctcgtgaagacaaacgaaaaggtctgccaacatcttctcccatccagactatactgtcggtcctggaattacaccagagtcaactgctaaaaaagcagatcgtggactttaaccaccggtcgggaattgcaccctgccccgaagatgaacgaatattttcttacaattttcattttaccatgaaaaaattttttggcaagtccttttgtatattttttcacgtaagcgctttctattcaaagtaaataaaaaccagccaattagctggttttatttattcaccacggaatatctgttgataatgattccgctaatgattggttttcttttaaacgaattttacgagcaatgctccttgcctcagcacccgcgtggattcttttttgttcttctgtttctggttcaacgagcggaacttctacagttttaccatccgcacccaatgccacaaacgttaaaaaggaagttgcagccaaataacgttctcctgttttcaaattctccgcaataattttaacgaagatttccattgaacttctaccagttgaagctacataagactctaagcaaacagaatgatcatttttaatcggttttaggaaatccactgagtctgtcgatgcagtgacaatttccgtacggcaatgacgcgaggcgctaatggaagccgtatcatcaatataggtcatcaatctcccaccaaaaagggtattatgattattcgtgtccgaggggaaaacccggctcgttttaattactagtgattctttacaaaattttgtttgtcttttttccatgtttttcgctccaatctatttatagagaggcaaagtgataataaaatcagatcctttacctaattcgctttcaactgatatttttccattgtgtgcttccacaatatttttaactatcgcaaggccaattccagttccaaccgcttttccacgttttcttgctttgtccactttataaaaacgctcaaataggtaggggatatcttcttccgcaatcccgctaccattgtcagatactgtgattacaagattgctcctagctacatcgatggtttgttttaaaattacttttccatcatagccttcttttccagtatgacgaatagcgttcataattaaattaattaatacttgctccatccggtccgggtcataggaatactctaaatcgggtgtttcaagttctaaaccgagttccacaaagttctctttcgcaagaacgtcaaaattagaaatcacttttcgcagtaacggcgcgagcggtaatttttgattatccatttgattaaaaccagcttccattctcgcaagatccagcatatcgttcaccaagcgtccaatacgaagggattcatcataaataatttgcgcaaactcccgcacttcttcatccgactgagcaaccccatcaataatcgcttcactataaccttgtagcatcgaaatcggggttcttagttcatgcgagacgttattaacaaaatcgcttttcattttttcaagttgtttctcttctgtcatatcgcgaataaccgcaacgatactacgcacatgttctcctgtatagagtaacgttaaaatggcaacatacgtatgatcagcaaacgtgatttcgccaacttgagattctttcttttctaacgtatcattcaataattcatttaaagccactggaatgagcactttttcggtattttcaggtgagaagaaccaattatgtaaaaattcttctgctggcggattactaagaataatcgttttatccacactaaatttaataacaccatcagccatcccaactaaaatattggatagctgttccttttcttgcctaagggcactaacattatacttcaattgctttgccatatcgttaaaagctaccccaagttcaccaatttcatcatgcgtataagttggtacacgattatcaaagttccctttagaaacagcaatcgcaatttttttcatttctcgaagcgggaaagccatgcgagaagaaaagacgaaagataagatagacgtaatgactatcgcaataattcccgaaataatcaaagtactcatcgttttttcgttcacttttaggatgtcatgataagactgatagacgtaaacaacaccagtttcaccgttcgctaatttgaatttctgtgcagagatttcaaccggtaaggaacttttttctgttttaaaattatatttcatcgttacactgttatctttttctaaagctttatctaatgtcttgtcttgaattaatttattggcagatgcactagaaatagtatctggtgactgtgattgatagacgctttttccgttttgttcgataatgacgcccatcgtatcatcaagtagtataagtgcagaatcattattattttcagcagagattacttcattattttcttgcattacagtgatgatactggctgttttgtcttctaattcatttgttattcgcgtaatattatttttttcataaatcattgccactaaaaatccggaaataactaaaatccctattagtaaaagaataatggtactccaaattttcccaacaatactattccaaatcttcatctattctcacctcggtcctcgcaaaaaaataacgaacaaagcacgtgcggcataacacttgccgattaaacgtctttgcccgttatcttagtctgttttattaatcttctggaacttcaaatttatatccaagaccccaaactgttacaatcattctcgcagcgtcttctgatacatcatgcagtttttcgcgcagtcttttaacgtgtgtatcaatcgttcgcaaatcgccaaagaattcataacgccacacttcttttaaaagtgactcgcggtcgaatactttatccggagatttagctaaataataaagcaagtcatattctttcggtgtcaaaccgatttcttttccatcgacaataacacggtgagcttcgttatcaatttttaaatgtgggaaggtaataatgtctcccggtgtgcctcctgctgattcttctgaggattgtttggcgcgacgaagaacagccttcacgcgaagcacaacttctcttgggctaaatggttttacgatgtaatcatctgcaccaacttcaaagccttgtactcggttagcttcttctccttttgcagtcaacatgacaacgggtgtggatttaaactccctcagttcacgacaaacttcgatgccatctttaccaggcatcatcaaatcaagtaggattacttcataattattgttcagcgccatgcttaatgcttgatcaccatcactagcttcttcaatacgatagttttctctttcaagatacatcttaagaaggcgtcgtatccggtcctcatcatccacaacaagcactctaacttgttcactcataagtactcatcccctaactctcatttacataaaacgatcatttacattcattcagataaatggaatcttccgtacccacatacgaaaaaaccatataattgcctataccaaatttcctacgatttaaattatacatgtttttcacaaaacacgctattagaaagtatattttgtaagaaaagttactttttatttttaccaaatcttgcttccgtttttaattgttttacttcatgatgggataattcccgacgttcacctgcgtttaaaccacgtaaattcaagaacgagtactcttctcttgataatttttgtacttcaaagccaactgcctcgaacattttacgcacttggcgatttctgccttcatgaatagtaatttctacaatggctttatctttcgttttgtcagacgaacgtacttttacttttgctggtgctgttttgcgaccatctatcacaacaccgcgttctagctgacgaatcacttctcgttcaggaatacctttgatacgcgcgatatatgttttggaaacttcatttttcggatgcattagtaaattagcgaaatccccatcattggtcattaataacaatccagaagtatcatagtcaagtcgtcctactgggtaaagtctttctggaatatccgcaaaataatccgctacggttgtacgacctttatcatctgttacagccgaaaccgttcctcttggcttataaaaaaggaaatagcgatgttcttcttttgttagttgaattccctcaacttcaattcgctccgtaccgctaaccttcacacctaattctgtgactactttcccgttcactgttactttaccttcttgaataagcttttctgcttttcttcttgaagtaatacctgcatttgcaatcactttttgtaaacgttccattcttattcctcctcctgttctttactttggttaaaccggtcaaaaaacaggtccatttcattctgatctggttcatctgtcgctggatcagcaagctttggtaaatcctctagagaattaagtccaaaagcatctaaaaactcacttgtagtaacgtaaagttttgctcggcctgcaccgtcaacacgacctttatctgttacaagccctttggcgaccaaggttctaatcggaccatcagtttgaacaccgcgaacctcgtccacttccattcttgtaactggttggcggtaagcaataattgctaatgtctctaatgatgcttgcgataaaacggtattgcttggaacttcgactaatttacgtaaaaattctgcatgcgcttttttcgtagctaattgaaatgttccggcaagctctagtaatattagacctctgtcagcactttcgttatatcgttcacttaaaagctctaataaattgagtgcttcaatgtgcgtgatttccatgacttcagttaattgttccgttgaaagtcccgcatctcccgcagcaaaaagcaaactctctaatacgcctaattgttcttctctgttcacgatatttcttcccctttaccttgcacatataaatccgcaaaactttccgcttgttctacttcgactaattttcgtttcattaattctaacaaagctaaaaatgtaacgacaagttgctctttcgtttgttcttcaaataactcgtcaaatcgtaagcgatgatttacttgtagatttaatttctctaaaacagaatccattctttgatcaatagagatttcttgtgttgtaattcttgtatggagcggtttatttaactttttccgacgtagcattttgttaaatgcacttagcatatcgtttaatgaaacatctagttctgccactttggtaccatcatcatactctgctaaatccatcggtggtttactaaaataaaagctccgttccgcttctttttcttttagttcttttgcggcttctttgaatcgtttgtattccattagtttttcaactaaagcatcacgaggatcttcttcctcttctagtgtatcataatcgatttccagttcttgctttggaagtagcatcttacttttaattgctagtaaagttgctgccatcactaaatattcactcgcgacatccaattccatttcttgcattgtatgaacaaattccatgtattggtccgtaatttcagccatagggatgtcataaatatcgacttctagttgtccaattaaatgaagaagtaagtcaagcggtccttcaaacgcgtccactttaaaattcatttctaccatatctgtcccgccctactataatgaaagatcattttgcactaaattttcatatgtttcgcgagcaacgattaatttatcgactccgttttccacaaaaacaactggtggtcttgggatacggttataattacttgccatcgcataaccataggccccagtacaaaataccgccaaaacttcaccagcgtttgattttggtagtggcaaatcccatattaacatatcaccagactcacagcattttcctgcgatagccactgtttcttctgctactttttcagggtttgccgctaaaacagcatcataatgcgcatcatataacgctggacgaatattgtcagacatgccgccatccactgcgatataatttctaattcccggaacttctttacgcgatccaactttgtaaagtgttgttcctgcttcaccaacaagggaacgacctggttcaatccaaatttctggaatatcaatatcattgctctcagccacatctcgcacttcatccataatttgtcgcacatattcgctaggttcaagaggttcgtcttctgccgtataacgcacaccgaaaccgccaccaagattaagtactttagaatcaaatcccagagtttggtgccattcaactaatttatccataatacgacgagcggctaatttaaaaccagttgtttcaaaaatttgcgaaccaatatgacagtgaaggccaattaaatcaaaggacgcacttgcatgaagtacttgtttaatcgctttttcagcttgtccatttgtaagtccaaatccaaatttcgaatcatcttggcctgttaaaatatagtcatgtgtatgagcttctatccccggggtcacgcgaattaaaaccgaagccttttcatttcgttctattaatatatcttctaataaactaatttcataataattatcgataacaaaacaaccgatgccatagtcaagcgccatatgtatttcttctgcacttttattatttccgtgaaaatgaattctttcaggagggaaatttgcttttattgccgtaaaaagttctccgcctgaaacaacatctagcgataaaccttcttcggccataagctgataaatagcaactgcagagaatgctttactcgcataagccacttgcgcttttacccctagctcttcgaatgttttcttaaatcctcttgctcggtcacggattagcgctacatcataaacgtaaagtggcgtaccatatttgtcagcaagctttaaagtgtccacccctccaatttcgagatgtccttctgcatttacattcattgttccaagccgttcaaacgtcacgccaatcccacctttacattatagatttttaaaagttcttttatatagtagcatactaagaagccgagcgacaataactatctgaaaatattatcaaatacgtaaaaaactcagcccaaatctgttatctccttgcttcagaaaataacaaattggggctgagattagctaccaattattttaagaaattttagcaacaattgcttttacgtattgtaaaaacgtgctacgaacttggtctgtagtttcaataacttctgtatgagaaagtggttggtccaaaattccggccgccatattcgtaatacaagaaataccaagcactcgtaatccagcatggttcgcaatgattacttccggtacagtggacataccaactgcgtctgctccaagcgtgcgcatcatttgaatttcagcaggtgtttcataagttggaccgctaaatccagcataaacaccttcacggatagtcaaattaagttcttgagcaataagtctagcatccacacgtagagctaaattatacgcttctgacatatctgggaaacgaggaccaaaatgctcatcatttggtccgataagtgggctagtccctgtgaagttaatatgatcagaaatcaacattaaatctccagcagaatacaattcgttcacaccaccagcagcattcgtcacaataagaacttctacgcctagctctttcataacacgaactgggaaagtaacatcttgcattgaatagccttcataaaagtgaaaacgtccttgcattgccacaacttctttattttctaactcaccaaaaacaaattgtccagcatgtccttctactgtggaaacaggaaaatgtgggatttcgctataagaaagttttatcggttggtttacttcatccgcaagcacacctaaaccagaaccaagaatcaaaccgatttttggtgtcccagtgtaactttctctaattttcgcaactgcttcgtttactttttctaaactcatttttgttcctcccttttcctatttcaagtctcttaaaaaacttgttccatattcaggcattttcacatcaaaattatcagcaactgttgcaccaagatcagcaaacgttttgcgtaattctaattctgaaccaccatttttgaagcgtggtgaataaacaagtaaaggaacgaattcgcgtgtatggtctgtcccagtgtacgttgggtcgtttccgtgatcagctgtaataattaaaaggtcatcatctgtcagtttttccattacttctactaaacgaccatcaaaatcaacaagcgcatccgcataaccttgaggatcacgacgatgtccaaaaagcgcatcaaagtctactaaattcaagaaactcataccattaaaatctttatctaacacagcgataaattggtccatcccgtccatattggattttgtacggatagattctgtaacaccttcaccgtcaaaaatatcggaaatcttaccaatggcaatcacatctttgccaccgtcttttaaagcatccattacagtgggtttaaatggttttagcgcataatcatgacgatttggcgttctaacaaacgcacctggttcaccgacaaatggacgagcgataatacgaccaagcatgtacggatcatctagcgtaattttacgacaaaattcacagatttcatatagttcttcaagaggtactacatcttcatgcgcagcaatttgtaaaactgagtcagctgatgtgtaaacaatgagagcacctgttttgacatgctcttctccaagttcagccataatttctgttccgctcgctggtttatttccaattactttacgtcctgttttttcttcaatttggttgattaaatcgtcaggaaatccatctgggaatacgcggaaaggtgtgtcaatgtataggcccatgatttcccagtgaccagtcattgtatctttaccgttcgaagcttcttgcatttttgtatagtaagcaagtggtttttccgcttttttaattccttcgatttcacgaatattcgataaacctaatttgcccatttcaggcatttttagtccgccgacgtgtttggcaatatgtccaaatgtatctacatcaaaatcaccaaatttagcggcatctggtgcttctccaataccaactgaatccattacaactacatgtactcgtttaaatttatctggcatatttactcatccttttcaactatattttttaagcgcgtgggtgaaattgtttgtagacatctttcaaacgcagctttgttacgtgtgtataaatttgtgtagtggagatatcggcgtgaccaaggagttcttgaaccgaccttaaatcagccccattttcaagcaaatgagtggcaaatgaatgacgcaaagtatgcggtgtaatcggcttttcaatgcccgattcttttgcaataccttttaaaatcttccagaaaccctgtcttgtaagtccttgaccgtgatgatttaaaaagacaaaatcatttcggtatttcggtctacgaagtttcggtctcgcttcctctaaatacttttctaacacagttgttgccgtttttcccagtgggataattctctctttatcccccttaccaatcgtttggataaaacccatatgaaggtgcaaatcgtccattttcaagctgacaagttcggttacacgaagccccgtcgcgtataaaatttccatcattgcttgatcacgcagtccgagaggtgtacttgtatcagaagagctaagtaacttctcgacatcatcaaggttcaaaacttttggtaatccctgggcttgctttggcgtttcaatttgaatcattgggtcatgtgacattttcccatcatgcattaaataatgaaagaaggatcgcagtgaagcaatatatcgcgctacacttcttggtgattttccttcttgccttgcaaatgccataaaaccaactatatcgcttcgttcaagtgtattcggatcagttaactccttcgttacatccatataagaaacaaaatagtgtaaatctcgttcataagctttgattgtattcgcggataaacctctctctacaattaaaaaatgtaaaaaatcttcaattaaatcattcataagcgtttcctccacaaatcctattctaccatgttacacccccactgaaaacgtttaattaatagaaaaagacttgtaatacttttcgcgcaattcagtccatctttttgaccataaaaaaagtttgagataaattatcccaaactctcgcattattcttttttagatttttgtctgcaattcgcgcaaatcccttggaaagtcagacgatgatctttaacaagaaagttccacttcgattcgacgattttctccacatcttctaataagtcttcttgaatttcctctacagacccgcactctaagcatactaaatgatgatgaaaatgtttagcgccttcttgtctcaagtcataccgagagacaccgtcaccaaaattaattttatcaaccacgcgcaattcggttaaaagctccaatgttctataaacggttgcaaggccagtgtcaggtgcaatatctttcacacgcaagaaaacttcctcggcacttaaatgatctttttcattttccagtaaaacgcgaacagtagcttctcgctgtggtgttaatttataactagcatcatgaagttgtgctttaatgcgtccaatacgaccttccattatagttcctcccttggttgctacaacaagttgtctttctaaattatcatcattatcatttaacaataaatacagtttataataattataaataaaatgcaagttaggaattcactttttacagtaaaaatggcacgtagtcaattcctattgcttatgtttactaagatatcacaaaagcaataggctgtctacaatgattatcaattactaattaatttctcgttatcaataattattattatttagcttttgcaagaaggaacaagaaataaggtgcaccgataattgccacaacgataccagcaaagatttcagaaggttgaataatcaatcgaccaattgtatccgcaagtagtaataatagccctccagaaagcgctgctgttaccatcacccagcgatgtgctgagccaactaactttctggcaatatgcggaccaatcagtccaataaatgcaataccaccactaacggatacacaggcagctgccaaaccaactgctactattaaaagcacaaatttttctcgctcaacccgaaccccgagaccagttgctacttggtctccaaaagagagcacatctaacgtttttactttcatgaaagcaattgcccctaaaacaataagccacggcaaaagggcaaaaacatactgccagcttgaagcccaaatatttcctgccatccattcagcatagcgttgataattttgtggatcaagccgaaccgttaataacgttataagtgccgcaattgccgccgcaacagcaataccagtaagtagcaatcgattaggaagtaacccctcgcttctactataagaaagtccatacacaacaaacgcggttaaaatggctccgataaatccgataaaaggcataaataacactggaacgtccatagtggaaggaaaaaaggaaatataaagcataactgcaagtcctgctccattattaatcccaagaattcccggatcagctagtccattaccagagatcccttgtaaaatcgttcccgaaaccgcaagtcccgcaccaactaacagcgcaataactatacgcggcaatcgaaactccgtcacaataagttgtgtcccagcatccgccatcccaaaaaacgacttaatcacttccaaaaatggcaatttcgaataaccagcattgacactatatgtaaatgtacaaaaaatcaacacacttaaaataattaacgtccaaatccgccgcgatttttttcgcttttctgcaatcgtcatatacattataagttcctcctttctttacgtgctacatataggaagaaaggaaccccgattagtgcaaaaataacactgattggcgtttcatatggtggattaattgttctcgccaaaatatccgccgctaaagtcagaaacgcacctacaacagctgagcaaggaataatccagcgataatccactccgactaaaaatcgtaccagatgcggtacaatcaagccgataaacccaaccggaccaacaaccgacacagccagccccgccaaaattaacaccacaaccatcgaagcaattttaacaaaagtagttttttcacctagaccaacagcaatatcatcgcctaagcttaaaattgtaatcgatttacttagcaaaatcgccgcaataagcgctccaagtaaccaaggccaaatagccgcaagctgactccattttacaccagcaaccccgcccgcgtaccaaaaggccaaatcttgacttaactgaaaataaattgcaagcccttcactaagcgcggtaagcaatgaactaaccgctgctccggcaagaactaaccgagttggcgacatcgcacttccagcaagcgaactaacgccaaatactaaaaaggcaccaattgccgcacccacaaaagaaaataaaatcaacgaattataactaagccaaggcataaacgcaaaacaaactgctaccataaatgttgatccagcattcaaaccaagcagacctgagtcagcaagtggatttcgagtgattccttgcataatcgctccagcaactgcaaaagcagcaccaaccgccatatcagcaacaactctaggaacacgcaaactccgtataatctggtgctgtgtatccgaactattataatgaaaaagtgcatcccaaactgtacttaaattaatatcagctgcaccaactgcaatcccgaataacgctagaatcagaagcaacaaaagcccacccgaaagtatgaatttagcaacagttggtcttgtattcatttttatctgttttgacttatccatctgcacatgttccttccatctaaattatccgctcgttttaagtgataataattatcaatcgcaaagaaaattatatcaatatcattcactaagcgcaatcattagttggacgcaagtaacttctctacaataatatccaactgcccttctactgctaaaggatcataataaaacatcgtatcaaaatccatttggtaaacatttccagctttaaacgttggcagatctttccaaattggcgagttggttaaatcttttaatgtctcctcgccgtccttagcattcccagaagaagtagtcgtcacgaacattctgtctgctgcaaattcaggtaaaacttccagtgaaatcttttgccaatcttgcccatctaaaacatctttctgaatttttgctggtgcttttagttgtaaagcattataaatcgcttgaccaccgcgccccatattttgtcccatcacataaaaatctttatcttgtacttcataaatccccactgtttcattcggatctaacttgccagccaacttcgctctactttctttggctttttgatgaaacttatctagccatgcctctccagcctttttttcaccaactaagtcagcgatttggcgtacgtcttcctctacatttttagaagttgcgtaaggaattaacacagttggcgcaattttcgacattgcttcaaattcatcatcgtttgaaacaatgattaaatcaggctttaattccgccactttttccgctgaaactgggtcaccaatatctgcaatcccgtccacttttcctttcaaaaacggattttccatttgtttcgctctggcccccacaggcttcattccaagcaaaacaatattccctagatattccgaagccacaatccgttttggatgagccggaatttctactttcttaccatttgccattgtatatgtacgcatctcgacctgctcacttccagccgatttgttatctccacaagcagttaaaaccactgcaataaaaagcattgatacgagcaaaatgataccctttttcaattgaacccctcctgtaactgataataattctcagttagtatagcaactttattcacaaagtgcaaatcattccagcaaagtaacgcttgcatcttcaccataaaaactctatacttaaccattgagaatgattatcaccttaactttaaattggagcgatgaaaatgaaagaccttcatacagataacttacaaatttcatacgacaaacgaatcattgttgatggtttagacatagccattccagcgaataaaataaccgctttagtaggtgcaaatggttcagggaaatcgactattttaaaaacgatgtcccgcttaatgaaacctagtaaaggcgctgtttatttagacggcaaaacgattcatagtcagccaactagagacgttgccaaacaattagctattttaccacaaaacccttctgcacctgatggtttgacggtgtttgaattaatttcttatggacgttctccgcatcaaagtagctttaaatcgattaccgcaaaagatcgcgaaattattttttggtcattgcgcgtgacgaatttaacggagttcgcggatcgacctatcgatagtttatcaggcggacaacgacagcgtgcttggattgccatggcgcttgcccaagaaacagatgtcctatttcttgatgagccgactacctttttagatatgacacaccaactagatgtacttaatttattgaaacaattaaatcaatcagagaaccgcacaatcgtgatggttgtccatgatttaaatcacgcatctcgttacgctcaccatatgattgctattaaagaaggaaaagtcattgcagaaggaacaccaacaagcgtcatgaccgaacaaactttagaggatgtctttaatatcaaagcagatattttaattgacccccgcagcggtgtccctctttgccttccatacgaaacttgcaacggatgcgaaattgtaaaggagcttgattccattgccaaatgaggtttatgatgtaaccattatcggcggcggtcccattggcctattctccgcattttatagtgggcttcgttccatgaaaacaaaaattatcgatgctgaacctgctgtcggcgggaaagttcgctactttttcccagaaaaaatcattcgcgatatcggtggtattcccgccattaccggcgaaaatcttgtcgcaaatttaaaacaacaagcagaaacgtttcatccaactattgtttgcagtgagcgagttgtagatgtgaccaaactagcagatggcacctttcaattaacttcgcataacggttcgattcatttttcaaaaacaattgtcattgctacaggtagtggtacgtttgaggtcaataagcttgaagctctacatgccgaagattttccatttgcaatccattatgatgtcaaaaatatcgagcaattccgcgataaagtagtagtggtttctggtggaggaaattctgctatcgactgggcgcagacgcttgaaccgattgccaaaaaagtacaccttatttatcgcggcgaagattttaaagcccacgaggaaagtgttcgtgaactgaaaaattctcgcgtcgaaatccatatccatcatgaaatcagcgaactaatcggaacgaacaaccaactaactgagattaccgtttgctgtaatcaaacgcagactacgaaaacaattgaaaccgaggcacttttcattaatcacggggtaaaagtagaccttggaacaatggcggaatggggctttaaacaagccgattttggcattgtcgtggatgatgaaatgaagacgacggttcctggtatttttgcttgtggagatagtgccacctaccctcgaaaaatacgcattatcgcagcaggactgcatgaagggcccatcgcgattaatagtgcgaaaaaatatttagaaccaactgccgcagatgaagcgatgattagcacgcatcacgaaagctttattggttaaaaaaaggatttgggctcactcgcccaaatcctttttttcttcgcatatcccaaattcgacaattcgcatcatttccgtaaagtcattcgcaagcggaacaaattcttccatcgtcgcattcggatggatctgcaaataaactgtactaatctccgtaatatgtttaaaaagagctgccatcactttacgcgctgcatccatattcacatcttttttcaacttcatctcacttaaaacttgattcatttgcgcctctgaccgctcaattgccttatcaaaaaagccatctagcttaccttttaattctactggcgggtttccataagcttgcataattaagccaaataccgccggaaacttgcgattaaaatccagtttcatcttcgttgaccaaatcgccatttcgacaaagtctccccaatgttccccttccaaacgaacctcattggtcgcaaaatcaaccgcataactaaccgccgcaatataaagcttttctttagaaccaaaatagtgaaagatcaaccctttggaaacaccagctttttcgcaaattttattcgtactagctgcctgatatcctttttccgtaaattctcccattgctgcttctaaaatttttaatcgtttttcatccattatactttcaaatcctttttcttataaagaacaaatgtcatagcaaccatcacaacaatcaccccacaagaaatcagtgcattggttcctgtaatccctttatccataatctcagacggaattgcatagttaattggtgaaaaatatttgaagaaatcgaccttatcatttaagccagccataattcctaaaatatatgttaagaacacaagcgcaagtgcaactggagaagcttgcttagcggaacgaagcaccgatgaaaccataaaaccagcactcataaatacagcagccaccagcaactcactagaaaacactcgtacaagctccatcactaaattaccaccgtcaaccccactcggcttcaagaaaagaactagcgccaccgatgctaaaaaagtaatcacccaaaaagccacaaatgataataaattcccaatcattttccaaaaaacaaggctagaccgcgtaattggctgcgcatataaaaattcaattgttccatctgtttcttcttttatcaaggcctgcgcaccaattagtgctgcgtacacacaagctgcaataaaaatatactgaaaaacataagcaaaatacgcatcaatattcgttaaatccgccatcgaatccatatgcaaaattttcatcatatcttgcggaagtgcattcattttcgtattcactaaatcttgcatcccgctactttgcatacttgggaagaaagccataaacacacctaaaatcacaatcaccacaactgcccaaacaaccagactctttattcgcgttttccattcaatgtgtaggatgttcacttgatttctcccccttcgtataatgtcataaatttatcttccagctcttgattcgtaatggttaaatccgtaatttctttttcttgtaataatggcaaaatcgtcttaatatcgtcatcaaaaataagccgcgctttccccatttccttttcgataattcttgcgcccgcattcgtcaatttttccagtggcaaatttgttcctttcagcgcaatcactttaccagtcatttgttgattagcgatatcttccaccgcgataatattcccatttcgaataaaagcagctcttgtacaatattcctgcacctcacgtaaattatgactagaaaggaaaatcgtcattccctctttatttcgctcagtcatttctttaaataaataatgttgcattaacggatcaaggccattcgtcggttcatccagaataaataattgcggctcagtaataagtccagcaacaattgctacttttttcttatttccaagcgacatttctccaaagcgtttttttggatcaatcgaaaacatttcataatatttattcattttttgtgttgcattttcaatatggtggaatttggcagcgtagtggataatatcatttgctgtcatttgtggataatagcgaacttcactcggcacataaccgaccatttttttgatttcagcggagtctttcaccacatcttttccgaggatcgtcgcaccaccactcgtcgcataaataaaattcagtaagactttaattgtcgttgatttccccgcaccattcggaccgataaaaccatatagttcgccttcatttactgacaaatctacattttcaattgctcgctttttatggtaattttttgtgagcgactccactttaattgcttccatgttctctcctccacactcaaattgaccacttagtcaactagagtataatctcttttgaccaggtagtcaattacgaactataacacaataaaaatctgtaagactgtatccagtaaaagtatccaaattactgttttcatgccagctcaagtctttaaaaaatcacttttagcttgataatgctaatttcaataattgcgttattccggatagaataactatattccaggtgatataatacagtatgtaagaaagtttatggtggtggctaactctttcaacatgaaagggggatgcctatggcttttttgttaggaactcctggaaaggataacccatgaccgtttatgaagcactctcttttgcagtcgcttttacaactttaatgttgttactaaacagtcaaaataacacaaaaaaataaccactcataaactttggacggtttagtggttatttttataacatattaaactagctgccatcttaaatgggcttacgtttgagggtcatgttcttgcatggctctcttttcatgtttatgataccacatttccattctttatgccaagtgttcccaaagaagttttttcaaccggtttattcattttcttctattaatagttgtaatttccagtactgcatcgcgtacattgtttttgcgtcatgaatgaattgttgttctattaattgttctgcttcttctggagttactttgactaaattaataaattcatctgcatcttgcgccaatggttgctccattttccggaggtcacgggctacatatatatgtaaaagttcattggcaaatccaggagatgtgtaaaaagaagtgagatatgttaaatcatcggactgaaaaccagtttcttcttctagctctcgtcttgcagtcacgagcggatcttcccctggctccattttaccagcgggaatttcaataattgttttctcaagtggttttcgatattgttctactaaatacattcctccatcttctgaaaaaggtataattgctacagcaccaggatgcttaacaatttcacgcttgctcttttctccgtttggcaactctacatcatctacttgtagttcgataatattgccgctaaaaatctgttctgtatgaagtgttttttcttctagtgagtccatttctgccacctactcctcgttttttttcattataacataactaagtccgagtttaatttacatcgcacgactgataacatctattttctaaatatggtatgataagaacaaataaaggacaatttctaaaatataaaaaccattcaacttgcctagcattcgcttacaaaatatacttaaatggtaggttactttccatcaatctttatttttagaaaaatttactataagaaaagcggaccttttaaacaggtacttaaaggagaagatgtataatgaccgtttttaaaaagatattagcattcacaggttctattttacttgtcattattttaggtggtattcttacttcacttatccatagtggcttggtaattgcaacaattgttatcgctgttgcagctatcctatttttcttttcatctaaagctggggaccgtgcgcaaatgattgcaactggattaaccaagaaagaatataaatatattcgtactaacttagaagaggcacgtgtgaaaattatccgccttcaaaaaatcatgacacaaaacaaagcgttatattctttccaagagcgtaacaaaacgcttttacttacaaaaagaatttatggtatcgtaaaagatgaaccaaagcgtttttatgaagcagaagatttctttttctcccatcttgactctttagtggagctaactgaaaaatatgctttcttagaaaaacaacccgtaaaagacaaaaaaatctatcaaacactttctgatacgcgtacacttttaaatgatttaagtcgtgttattgaaaaggatttatttacacttttgaatcaagatgtgaacaaccttgacttcgaactagaagtagcgaaaaactccatttctaaacagaaaaagaaatttgaaaggggtacaaaagatgaccgagaacaagccaagtgaacaaacaaatgaattaaaagatttagtagttgagaaagaattcaaccaaacgttagatgatctccttgctaacccgtttggatcagatggtgaatcagctgcaagcatcgtaaataatgaaacagatgcagctccccgccttgtcgatatgcttactgaaacaaataaaaaacaagcattagagttatccaaacaaatcgaacctggaaatcaagcagccattcttggctacggagctccagcgcaagccaaactccatgatttttctcattcgatgttagcacatgtacaaaagcaagatgttggaccaattggcgatattattagcgatttaatgtatcgtttgcaagaagcggatcctgatgaacttgccgctcgcaataaaaatgtcttcactaaaatgttccaccgagtaaaacaatccatcaacgaaattacttctaaatatcaaaaaattggtacccaaattgaccgcatcgcgttaaaactggaacattccaaaaagcgtttaatggaagataactctttcctagaacagctttatgataaaaataaagattacttccaagcacttaatatttacattgctgctggagaactaaaattagaagaaattaatacaaaaatgctcccagaacttcgcaaaaaagcggaacaaacgggcgaccaaatggattaccaagaagtgaatgacttaacacaatttgctgatcgtctagataaacgagtatatgatttacgtctaagccgtcaaatcactatccaacaagcaccgcaaattcgcttaatccaaaatacaaaccaagcactcgctgaaaaaattcagtcttctattatgactgcgattccactttggaaaaaccaagtggccattgcgcttaccttgctccgtcaacaacaagctgtggcagcacaacgccaagtttctgaaacaaccaacgaacttctcaaacgaaacgccgatatgctaaaaacaaacgctatcgaaacagcgcgtgaaaatgaaagaggtatcgtggacatcgagacacttaaagaaacccaatctagcttaatcgaaaccttgcaagaaacgcttaaaatccaacaagaaggccgtgctaaacgtgccgtagctgagaaagaacttgtaacaatggaacaagaacttaaagaacgtttactggaaatgaaataaacaaaaccccactcttacgaaaaagagtggggttttttcatcccttttatttagttaaataaccataaccttctaaaagaagtgctgtcatcttttctgcaaacagttctatcatctgttcccctttctcctctgtggcaagactagcatcaccatatacaccacttttgcttaaatcacctagcgaaatagttgttttcccataaagagttggtttttcgggatattctctaactgcctttttcatttgcactaattcttttttagtcgcaagcattaaagaggtttcaaattcacaggcatgaatcattccgtgccatgtaccagactcacaattcttttccattacttcagaaagagatggatagaatagatacataacaggcatttctaactcatctgctaattctctaacagcatatttcatcgagttattgttagaatcatgtccatttattaagacaagcattttgacaccatagcgagaaacactgtgtgcgacatctttaataattgcttcgacatgatgttgttgaatagagatcgttcctggaatatcacgccatacccaagaatagccaaatggcattggtggaatgactactgctcctgttttttccgatactaattctgctaaatggtctgctaaaaatatatcaactccaagtggtaaatgatgtccatgttgctctgttgctccgagtggtaaaattgcgactggaaaatcagttatcgctttttccacttcatctcgtgtcatgtttattattttgttggctgattgcaccattttacatccatcctatctttgaaaagcttttacattttctcttatttgattgagcatagcctttgtggcaccacgtggaacaagctcacttccaatagcgtaagaatcacaccccgccgctttaaattctgcgatatttcctgaatccaccccgccaactgccattagatggatattagggaatggacctcttaaacttttaatgtaagtcggtccaagtgttccagccggaaaaactttaaaaatttctatgcctaattgtattccttccataatttcgcctggggaaaatactcctggaaaaacagctatgtcttgttttatgcattcttctacaatacttttttcaaagcctggagtcataataaacgttgctcctgcttgtttcaccttttgaatttggtttttttctacaactgtaccggccccaattgtcaattgcttagctgaaaaatgctgacttacggcttctaaacaagctaatccttttgtttcattacttaatgagacttccagcattgtaattccttcttctaaaagtaattctacaatcggaataaaatcttcttttgctacatcccgaataattgccatcaattggtctttctccatagttaacaaatcacacgcactcctttactaaaatttggctagccagttggctggattatcataaaatatagtttgtatttgttgctccgttacgccttcttctaaaagccttggaataaattttgtttttataaaacgaaatcctggaccgccaccatatgcgtgcagataactttttcttcccatatctcccgagatgagtaatttatccccaaaaccattttcaagcatatttttcactagttcaactcttgtactatcaggatagtattttacttttccacaaccatcaaactgaacataagcccctttttcagctaatttcagatgatagtacggatctgcattgcgatcgctatgtccaacagctaccagctccatattcacgccttcttcttctaagatagcaagcatttcctgccccattgtgccagcttctgtatgcaaccaaattggtgcaccagtctctttttgagcccatgcaacagctcgtgttactttgttctctaatggatgaatgaggttgtaccatgaacctgacttcaaaatccctgcacgagcatcggaaccatccattcctttttcaatatcataaattaatcgatctgtaatttgttcgatgctttcctcctgtacccaatccgggaaataaatatgtttattaaatcctgtaacaccaagaacattcacgccagattcttcagacatagtttttagtttatttccatcacgaccataatccagcgtcgaagcatctacgagtgtttgacctccaatagattgaaatgtttttaattcttctaaggaggactcataatctgttaattcaaaatcacggtctttctgtactgaaggtggacaacaccacaaatgttcatgtgagtatgtgaaaccaaggctttctttcgagatgtcaccaagaaccgttcttattttcttttccatttaaaaccatctcctatatttttttaaagtgctattccaaataatgctccaattaatcgaataatgacgataacaatgattgcatccgtcgaagcaaaccataatccttgaatgccataaccatctaatcctaaaattggataagcaattgctacaatcatttgaaaaataaatcctaataataaaccagcaataatggctcctcgtctaccacccattgcatttccaaatacaccagccgctccgcccataaaaaacaatccgataacagacggaagtacgacaacgggaagcatggtagaaactagtgtcgctccaagccctccaactactgcgcataaaaaaccaatggtcgttgcagtaggtgcgaatgaatagaaaacgggaacatcaagagctggaattgcgccgggaacaattttctcgctaatacctttaaacgctggaactaattcacctaaaaacatccggaccccttgaagtagtatcaatattccgacaacaaaagtgaatgattgcaatattgcgaataatacattactttgtgtgccagctaattctttcatcaccggttcatccacaaagaaagaagtaaatatataaatcactgccataacaatccccattaaaacagacatttctttcaaaaaatctagttttttaggtacttttaagtcttctgtagaattagctttatttcctaatttccctccaagccaaccggtcgcccagacaagggaactgccccaaaagccaaaaccgacttgatcatttcctgtcactttgcgtacaaaaggttgtgcgagtgctggaaaaacaatactcgaaataccctgtgcgatagaaccaaacaaaataatttgccagctattaaagcccatttgatcgaatactatggccattgtagctgcgaaggaaaacatcatatgccctgttaagaaaatatatttccatctggttgttctagcaagaataacattaataataaaaccaaatacaagaattaaagacgtttccgttcctaaaatttgctggacagcagctgcaatagcattatcttctgcaaccacccctttaagttgaaaagcattttcaaacattgtgctaaatggaattaaacttccaacaataatcgcggatccctgttgtagcataataaaaccaaaaatcgtttttaatgttccttttacaatatcagaaccggttttccttaaggcaattaacccaatagcggctataattcctaaaataaaagctggcgtagaaaaaatttctgtgatgaaagtaagcatcttcatcctccttttttatgaagcaaagtattgtttgatagctggcaaaactttttcttctatttcttttttatcgagaatattaatgattgggacaactttgacttcttcctctgctaattctttggctatttcactggaagcaacaatcatgtcgcactttctccccttcgcactacttaaatccgttgcctcccctccaactgtaaagccatgtttttttgccatatcttgaatttccatgagtaacatcaagctagttccaaatcccattccgcaaaccgttaaaatttccactatttttcctccttattaatggtgcataagatttccgctttatcggtacttgtttttaatctttttaatttatcttcatcggttaataattcactaagcgcttggagcattttgatgtggaaattggtatctacacctccaattgcgataaccagactcacatcgtcattggctgggtgcccaaatttaatcggttttttcaaacgaacaattgacatgcattgttttttcaccccgtgttcgggccgcgcatgtggaattgcaatatgtggtgctaggactatataaggacctaatttttcataactagctaccattgcatctacataatcagatgaagcgctttcagtttttactaagagatttccggcagctctgatagcatctaccggactttctacctccacatccaattcaatttgttctaaagtaattggtaacaatatgacttcctccttttctatatgatatgttttttagttctaccttctaattcagccaaatattggtacctatctccgcgagctaccatatccaccacttccactggggtattgcctttcatataggaagtacgtcgcacatgaagcaccgcagagtcttctggaactgcaagcaaggcagattcaatcggggtagataatcttgctgtaataatttcatctgcatgtactaaactaatatgataaatttcttccaaatcatggtaaagggaatctgatttcaaaccattctctagtaaaccaggaacatatttggcgcgtaaataattaatcataattgcaacaggttcaccatcaatttctctcacgcgtctaatacaagttacttcttcatgcttgcctaattggagtgctgtacgaattttttttgacgggattgctgcagaaatttctacactgatagtcttagattctttatgttgtagtttcatttcctctgaccaactaaaaatccgtccaagtccttgtgtagtctttgtttgactcacaaacgttccttttccttgttgtttacttacaattccctcatttaccagctcttctatcgcttttcgaactgtcatcctgctaacatcatacatcttttcaatttctgtttctgtcaaaagtaaatctccaacagacatatcttgttcaattttctcttgtagttgatttttcagttgcatataaagtggtgtagaagatgatttatttaattttttcatattagttccattcctcccgaaaagttatcttttgattcattataacatttgcaataatataatcaagaaacattataacctttcgtcattttcagtgtataacatcataatgaattagtcaagatttttttaaaggttataatctataagcgtaaaaaaaagaaaaggctgggtgtccttttcttttttaaagtccttctaaacgtaaattttcaaaataaacgggttttaaattggttacagtaagcccaatcaaccgaatactatcctgaccagtatagctttctattaaaagaagggctgccgcttgataaatttgacttgcatcattagtatattcgtttaaagtaaggcgcttagtaattgttgtaaagtcactgtagcgtagttttagtactaccgtcttaccgtgtttttgtagtttaatgagccgttcttctacttttttggcgaattgcatgaggctttgttcgagaactcggctatctaagacattaaattcaaaagtagtttctttaccgacggatttgcgatcacgatgcggattcacaatgttgttagaacgacctcgaacatgtcgatataaatgatatccatgtttgtgtaattcgcgaataaggtcccactcgctccacttcttcaaatccgcccctgtttcaattcctaaacgatgcaatttttctgcggttacttttcctaccccataaaatttagtaactggtatttgttctaaaaaggcttctgcttcttcgggtgtaactaccgtaatccctgcaggtttcttaaaatcagaagcgatttttgcgataaatttattgaatgatacgccggcagaagcagtcagaccaagctcttggtaaatcgtttgctggatctcgcgtgcaaccattgtggcggatttcattccttttttattttcagttacatccagataagcttcatctaaagagagcggttcgataatatccgtatatctggaaaagatctcgcggatttgattagaaacctctacataatgagccatattgccgtgaataaaaatgccattcggacaaagtttagcagcttgcctggtgggcatagctgaatgcacaccgaatttgcgcgcttcataagaacaagtcgcaacaactccgcgtttattagggtctccaccaataataagtggcttccctcggaactcaggatggtcgcgttgttccacagatgcataaaaagcgtccatatcaatatgaataatttttctactcgtatccataactgcatctccctcaaaacgaacaagcgttcttattcaattataaaggttatcctcattaattacaagaaaaaaataccctattttcataaggtattttcttccgttttatttctttaaaaacgcacctttaccgaagaattcgataacttgtggcattacttgataaagtcgtgttgcaatgttcatcacaaaaggtaaattgatttcgcggcgcttagttcccataatttgcactgttttatgcgcaactttttctggctttaacactaatttgccaactgtttctaaatagttgcttgatttatccgctacatcgaaaaagttcgtggcaattggaccaggattgatcgttgtaacattgattttatctggcattagttccaaacgaagtgcatttgaaaaacctaaaaccgcatatttcgtggctgagtaaacggttgattttggtgtagcgattttagcagcttgagaggcaatattaataatatgtccagctttgcgcgcttgcatttgcggtaaaatcagttgtgtgagttgaattaagccaagtacattcgtatcaaacattttttcaattgtctcaaatggaatatctatcgcgttttcaaataaaccaaaacctgcacagttgactaatacatcaatttgatacgatgcatttatctctgcgctgacttgtttcacttgctcgaaatccgtcatatctaaagtaaaataagttgcttctactgaaaatttatcatgtatatctttttgtaattctattaattttttcgtacttctggctgttataataacattaccaccggacatagcaacttgtcttgcgatttcagctccaagaccgttagaagctccggtaattaaaaccgttttattcttcaaaaaagggttcattttgtcactctcctacttgaaaaacagctaaatcataagctatttcagtattttcaaaaatagtttttgcttctattaatagttctttacttgcatctcgatcatatcttgagctgatatgggttaaaattaattttttgacattggcggttttagcaagcttggctgcttgaagcgttgtcgaatgcatatattctcctgccatttttgccttatcgccttcaaatgttgcttcgtgaaccaaaatatcggcattcaatgctaattctagttcactactggtttctcttgtatcaccaaaaatactaataattttccctttttgcggctcaccaatataatttttaccatcaatgacgcgtccatcagctaatgttacgatttcgccgtttttcagcttttgaaaaactggtcccgcttcgacgccgtccgcttttaatttttcagcattgagtgcaccttgtttatctttttcgacaatacggtaaccaaagctacgtaccccgtgatcaagatcgtcagctgtaactataaacatcttatcttcaaaaatcacacctggctctatttcttcaaaattgattttatatgtaagtcttgttccactgagtcttaaggaagtttcgacatattctgctattccggcaggaccgtaaatagtcaaattagagtctcctccttgaaaagaacgactacttaataagcctggcagtccaaaaatatgatctccatgcatgtgagtaataaagattttttctagtttacttagtttaatttggcttcgcatgatttggtgctgtgttgcttctccgcaatcaaatagccaaattgtatttcgttcatttaacattgaaagtgcgatggatgtgacattacggcctcgcgacggtacgcctgctccagttcctagaaaaacaagttccatttctgtttcattcccttcccagttcgtgtcttattttatcatattcttaaacgaacaggaaataaacatttctacgaaaaaacccttataattcagaaataactgtcaaattaaaaaaatattcgaatcaaacagttgcacaaatgcttctttatggataaaatagtatggactaatgaggaaaattaatagctcatttaataaggcctttttttgtggggttcttttcaaactaagaaatctttttcttagcagttaatttttgccattaagagaataagaaagagggtaaatgacgtatgacagatgagttagaacaaaaagcactgattactatttttggcggtacgggagatttggcaaatcgcaaactttacccttcgctatatcatttgtacagtaagggatctcttggcgacaattttgctgttattggaacggctcgtcgtgaatggagtaacgatttcttccgtgataaagtaaaagagtctatcaaagacattgacggttctgaaaaagacgcagatgcatttgcttctcacttctactatcaatctcatgatgtgacaaataaagaatcttatctaactttaaaagatttgtctgatgaattagatgcaaaatacgaattagatggcaatcgccttttctatcttgcaatggcgccaaatttctttggaactatcgcaagtcgcattaaatctgaaggctttgttgatacagacggtttccatcgtttaattatcgaaaaaccattcggccatgatttagctagtgcggaagaattaaacaattcacttcgtcaagctttcaaggaagatgaaatttatcgtattgaccattatttaggaaaagaaatgatccaaaatatttcggttattcgttttgcaaattctattattgaatcgctttggaataatcgttacatcgataatattcaagttactttaacagaggtacttggagtcgaagatcgtggacgctattacgatgaaagtggcgcacttcgagacatggttcaaaatcatatcttacaaatcgtttctttacttgcaatggagccaccgattaacttatctactcgcgagattcgtcatgaaaaagttcgcgcgcttcgttctttacgcgtttttgaaggaaaagaagtgcatcaaagctttatccgtggtcaatatggtcccggtgaagtggatggtaaagagttaaaaggttatcgtcaagaagataatgtggatccccattccaatacggaaacatttgttgcagccaaacttgaaatcgataatttccgctgggctggcgtaccattttacattcgcactggtaaacgtcttgcgaagaaaacaacgcaaattgcgattcagtttaaagatgtcccactaaacttattcgggcaacaacaatcacttggtggtaatgtgcttgttattcatatccaaccggacgaaggtattacacttcatttgaacgtaaaagaacctggtcaaggtatggttacgatgccagtcaacttgaattatattcattcctctccagacggcatgaacacacctgaggcttacgaaaaattgattctagactgtcttcgcggtgacgcgacttacttctctcactgggatgaagtatcgctatcatggaactttatcgaccatatagcagatgtttggacaaatacgaaagatcatttcccgaactacaaatccggttcaatggggccaaaagaagcagacgacctcattcaacgtgacggattccagtggttcccgatcgattaatcaaaaaaccagaaatatggctactctagcctatttctggttttctttgtttacttgcaaaaacccctatgcatgttagaatagagaggaaaactaactagttaaaggagctcatataatggctgaaaatattgatgactacttagaaaaaggcatgtatggggcaaaagagattaatcccgctgagaagaagaaatatctaggaacataccgcgaacgtgtcttagtcgcactcacaaaagaagaagttttgactcaagaatatcttccagaactagaaaaagcaatactagaaaatagtgactccaagcttctcttaaacggattactccattataattctttacgcccttatatcaaattagcagaaaaatgtaaacatgaattttcgattgttactcgtttagaaggtgaaacagatatttacctcgtcctcgcctgtcaaaaagcggtaaacaaggaagacattcatttatataaagaagcagaagtagaacaagaagaagaacctatctcgttacttgagaaggttcgtaaactgtttaattaagttttccgcttactatttaggaggtcgatttatgctacacatcatcactctgtcactcgctattttgatggcgttacaaacaatctatttcttcattcgtaaaaatgtcaatatgggcgttatgtttttactcataacagctgcacttcttttactcagtacgatttaatggaattcctgtttcgacagcttgctttaaattttgctgcataacaccaattccagatgccccgtcgagtgggaaactaaataattgcttaccagccgtaatgctcgttaataaccctctgaactttttgccgcctaacatcggaattggttcggtagggtttatttgtaatttctgccactgctcctttaattcccctagctgaatcgtatccgcgccagttcctttcatggtgaaacgaacatcgtatgtttttaaaacaatatcgtccggtcgtaaaaaaccatatttgggggataaaattaaatattcatttgcaaattgttccgcataggctctacttaaacgatgaaatgttccagtatacacctcgcttgcttttactggacctatatcaggcaacttatcccatatttttggttttcctgatgcaataataatcaggttcgttttattggatattcccacatcatcactcttccttgtttctcttctgtatctttttcttttatatgtacgaaatggttatgttttagtacttggatggaggctatgttctgctcgtagcttctggcaaatatgcgacgaatgaccgattgttcctccagccaagcaaccatgcctataagcgcctctgacatatatcctttattttgataatccggtacgatgctgtagccaatttcgatttcgcccgtttcgtccggatttccttgtccaccaatttcgccgataattttattttcttcttttaaaacgactaggcgtgtccatttaatcattctatcgtcttttttcacgttttctaacacatatggtaaataaaaaaagaaatcaattcctggccagtcaggtgacacatggtaaccacttgctttttccaaagcttctgtcccattaatcgttgcctgaatcatttctagtgtgtaattaattaatattaatcgatctgtctctaaattatccacaacaaaaacccggctttcctactaatttattactttcaatttagcagaattggatagaagaacgcaactaaagtgtgattttttatccgaataattaattaaatagtcaaaaactataaaaataaaactattctgactatatacttgacctttcgtttttgaatgcgcttccatttaagttatacttcaaatataagacctggtactaattcctgctaaaagtgtaagttgcttgaattgtgcaaactgacggaaaactttcaaaataacaattgacaatcgcatggcaaccatatatattaaatactaacataacatttcttgatattaatttttttcaaaaatgtgcgactaatcgaaaaaaataaaaccatttaacgaaggagataatgacttatgaaaacgaccaaatcagtcattacaattttattactctagaaggactttgagcactgtagaaatttacagtagtttgagtcctgtttacgttaaatgggattctagcaaagcatcccattgttttcatcattggggtgctttttatttagctagatttcgagttttcaagcatcgaaaagccattatcaagcgagcagatacttaatcatataaattaatgccacgctatttagtgaattctaaaaattcagtgtcggcaaacaattcttaattagaaatggggtaaagtcatatgcgtagtgacaaaataaaaaaaggtgtcgaacaagctccagcaagaagtttgctgcatgctacaggtcaaattaaaagtccaggtgatatggacaaaccatttatcgctatttgtaactcttacattgatattgttcccggtcacgttcatttgcgagaacttgcggatgtagccaaagaagcaattagagaagctggcggtatcccatttgaatttaatacgattggtgtagatgacggcattgccatgggacatattggtatgcgttattcccttccctctcgtgaagttatcgcggatgcagcggaaacagtaatcaacgcgcactggtttgacggggttttctacatcccaaactgtgacaaaattacaccaggtatgctacttgcgtcggttcgtaccaacgtccctgctatcttctgttcaggtggtccaatgaaagctggattgtcagctcacggaaaagcgctcactctttcttctgtttttgaagcggttggtgcctttaaagatggcagcatgtcgcaggaagatttccttgatatggaagctaatgcgtgtccaacttgtggatcttgtgcaggaatgtttacagcaaactcaatgaactgtttaatggaaattctaggtatggctgttccgggaaatggtacaacacttgccgtttctgacgcacgccgtgatcttattagagaatctgcttttcatttaatggatttagtcaaaaaagatattcgtcctcgtgacattattacaaaagatgcgattgatgatgctttcgcgcttgatatggcaatgggcggctctacaaataccgtattacatactcttgcccttgcaaatgaagctggtattgaagactacgatttggaacgcattaatgatatcgccaaacgtgtcccctacctttccaaaattgcaccatcctcttcttactcaatgcatgatgttcatgaggctggcggcgtttctgccatcgttaaagaattggttgatcttggcggcgcaattcatccagaccgaattaccgttactggaaaaacgattcgtgaaaacgtagctgatgccaaaattaataataccgatgttattcatccaaaagaaaatccgtatagcccagttggcggactttcgatgttgtttggtaacatcgcaccaaaaggagctgctatcaaagttggtggcgtagatccttccgtacaagttttcaaaggagaagcgatttgctttagttctcatgatgaggcggtggaagcaattgataatcatacggttcgtgagggccatgtagttgttattcgctacgaaggtccaaaaggcggacccggaatgccggagatgctggcgccaacttctagtattgttggacgtggattaggaaaagatgttgctttgattacagatggtcgcttttctggagctactcgcggtatcgcagttgggcatatttctccagaagctgcggctggtggtccgattgcactcgttcatgatggtgatatcatcacgattgatttgccaaaccggacgttaaacgtggatgttcctgatgaggttttggaagaacgaagaaaagaattaccgaaatttaaagctaaagtaaaaactggttaccttgcaagatatactgcgcttgtaactagcgcccacactggtggtattttgcaaattccagaagatttaatcgactaaaaaatgaggtgataagcgtgattgatacgacgaagacaaatgaaaaagcgacaaaaaagcaaaataaaagtggagcggaacttttaattgacgccttgaaaaaacaacaagttgacatgatttttggttatccaggtggcgctgtgttacctctctatgatgctttttatgactgcgatatcccgcatattctaacacgacacgagcaaggagcgattcatgctgcggaaggttatgctcgcgttactgggaaacctggtgttgtggttgtaacgagtggccctggtgcaaccaacgtactaactggtatcgcggatgcaatgagtgactcgattccattagtaatttttaccggacaagttcatacgcctggtatcggaaaagatgctttccaagaagccgatatgattgggctaacgattccaattactaaatacaattaccaagtgcgtgatgttcgtgacttaccaaaaatcgtcaatgaagcttttcatattgcaagtactggtcgtaaaggccctgttgtcgtggatattccaaaagacatggggattatccaaacagagtctgtccggccagatacgattgatctgccgggttatcaaccgacttattcaccgaacccacttcaacttgaaaaactaatgcaatctctttccgccgcaagtaagccactaatacttgccggagctggcgtcaatcatgcgagagctacagctgaattactagaattcgctgaacgctatcaaattcctatcgtgaatacactgcttggtctaggaagtttcccgcaaagccatgatttattccttggtatgggtggtatgcacggttcttatgcagcaaatatggcgctaacggattgcgacttgctgattaattttggctccagattcgacgaccggcttgcaagcgcgccgaaagaatttgccacgaaagcaaccattgctcatatcgatattgatcccgcggaaatcggcaaaattatcgaaacgcaaattccaatcgtggcggatatcaacgaaacgctcacgcaactactacaaatggaacttccggttcatccggatacatcccattggtacaaattaaatatgacgcgcaaaaaccgtcatccttttaattttgatagaacgaaaaaagcggaaattaaaccacagcgtgtcattgagctaattggtgaaattacgcaaggtgaagcgcttgtttctaccgatgttggacagcatcaaatgtgggcggcgcagttttatccattccaattcgatcatcaaattattacaagtggtggtcttggcacaatgggctttggattccccgcagccgttggggcacaactcgctttcccagataaaacggtagtcgcaattgttggcgatggcggtttccaaatgaccaaccaagaactcgcgattttaaacgattatcaaatcaatgtaaaaacggtcattatcaataatggttcgcttgggatggttcgtcagtggcaagaaaaattccacggtgaaagatattcccattcgattttcacgagccaaccagattttgtcaaactatctgaagcttacggtgtcaaaggtgttcgcctaacaaatccggaaacactagaaaaagatttaagaaaagcgttcgctcacccagggccaatcgtaattgatgtccatgtagcaaaagacgaactagtacttccaatggttccaagcggcaaaccaaatcaccaaatggaaggggtggaataaatgcgccgaatcattaccgctacagtaaacaactcttctggcgtattaaatcgtatcactggggttatctccagacgccaatacaatattgatagcatctctgtcggctggaccgaaatcccaaatgtttcccggattaccatcgtcgtccatgtcgattccttatacgaaatcgaacaagtaacaaaacagctcaacaaacaaattgacgtgctcaaagtgagcgatattactgacgatgcgcatatcgaacgcgaactagctttacttaaaatcaactcccccgccgccttacgatctgagttaaacgcagtcatcgaaccatttcgcgcaaccgtcattgatgtcggcacaaaaaatgtcgtcattcaagtaactggcacaagcgaaaaaattgatgctttcgttgacacggttcgtccctacggcattaaacaaatggcaagaactggtgtaactggctttacaagaagccctaaaaaaatgggttaaaatcatttactacagagcagtctcttgctttgctagcatcagaacagcacatcgctattctgaaatataaaaagaaattagttggaggttaggaaaaatgacaaaagtttattatgaagatgcagtaaaaaacaacgcactagaaggtaaaacagtagcagtaatcgggtacggttcgcaaggtcacgcacattctcaaaatctacgtgacaatggcaataacgttattatcggcattcgcgaaggaaaatctgccgaatctgctagaaacgatggctttgatgtttattctgttagcgaagccgctgataaagctgatgtcatcatgattcttttgccagatgaaacacaaggcgaaacatacgaaaatgaaattaaacctaacctaaaagctggtaattcacttgttttcgctcacggttttaacattcattttgacgtaattaatcctccaagcgatgtagatgtttttctagtagctccaaaaggtcctggtcacttagttcgccgcacatttgttgaaggtggcgctgttccttccctattcgctatctatcaagatgccactggaaacgcacgcgacacagccctttcctatgcaaaaggtattggcgcaactcgtgctggcgttatcgaaaccactttcaaagaagaaaccgaaaccgatctatttggcgaacaagcagttctttgtgggggtgcgactcaccttatccaagctggtttcgaaacacttgtagaggctggctaccaaccagaacttgcttattttgaagtattacatgaaatgaaactaattgttgatttgatgtatgaaggtggtatggaaaaaatgcgccactcgatctccaatacagcagaatatggtgattatgtttccggtcctcgagttgttacagccgatacgaaaaaagcaatgaaagaagtacttaccgacattcaaaatggtaactttgctaaatctttcatcaatgacaacaaaaatggttttaaagaattccatagaatgcgtaaagaacaacaaggtcatcaaatcgaaaaagttggtgcagaacttcgcgaaatgatgccatttgtcaaaccacaacattaatacttaattcggattgctaggcgagtttttcgcctagcaaccgtttatcctttttcaatatgagtttaaggtagaacgcgtttctttcttaaactgatactgaaagcaggaaaaatccaagcttccctatctaatataaaacaagaggtgaaatcgaatgaagaaaatccagttttttgatactacacttagagatggcgaacaaacccctggagttaattttgacgtaaaggagaaaatccagattgccttacaactcgaaaaacttggaattgatgtgattgaagccggctttccgatttcttctcctggagattttgaatgcgtcaaggccattgcaaaagcgattaaacattgttctgtaacagggctagcgcgctgtgttgaaggagatatcgaccgcgcggaagaagcgcttaaagacgctgtttctccgcaaatacatatcttcttagcaacgagcgatgtgcacatggaatacaaattaaaaatgagtcgggcggaagttcttgcttccattaaacaccacattagttatgcaagacaaaaattcgaagtagtacagttttcaccagaagatgcaactcggtcagatcgtgcttttctaattgaggccgttcaaacagcaattgatgccggggcaactgtcatcaacattccggacacggtcggatatactaacccaaccgaattcggacagctattccaagatttgcgtagggaaattaaacaatttgatgatattactttcgcttcccattgtcatgatgaccttggtatggcgactgcaaatgcacttgctgcaatcgaaaatggcgcaagacgcgtcgaaggtacaattaatgggattggcgaacgagctgggaatacggctcttgaagaagttgctgtcgcgctgcatattcgcaaagatttttatcaagcagaaacaaatatcgttttgaaccaatttaaaaattctagtgatctgattagtcgtttgtcgggtatgcctgttccgcgtaataaagccgtaattggtggtaatgcttacgcgcacgagtccggtattcatcaagatggcgtgctgaaaaacccagatacgtatgaaatcatcacccctgcccttgtcggcgtggataaaaactcgcttcctcttggtaaactttctggcaaacatgccttcaatacgcgcatggaagaaatgggctacacactaaccgaacaagaacaaaaagatgcctttaaacgtttcaaacaactagcagatgcgaaaaaagaagtaactgaagaagacttgcacgcgttaattctcggccaatcttccgagtcagccgatgatttcgaactaaaacatttgcaagttcaatatgttactggcggcgtccaaggtgcgattgttcgcattgaagaacgtgatggcgctctagtagaagatgcagcaactggttcaggtagcattgaagcgatttacaacacaattaatcgcctaatgaaacaagacatcgaattaaccgattatcgtatccaagcaattacagccggccaagatgcccaagcagaagtccatgtcgtcattaaaaatgacaaaggcgctgagttccatggtatcggtattgattttgacgttttaaccgctagtgctaaagcttatttgcaagcatcaggcaaaagcaaaaccgccagtaagcaagctgatttcgaggaggtaaaataacgtgacctataaaattacttccttagctggcgacggaattggtccagaaattatgacttctggacttcaagtattagaggcagtcgcaaaaaaatacaaccatacgtttgaaattgaatctcatccctttggcggcgcaggaattgacgtagcacaagacccaatcccttcttccaccttaaaagcatgccaagacgccgacgccattttactcggagcaattggtggtccaaaatgggataatgcgccgaaacgtcccgaagatggcctacttgcacttcgaaaagcgcttggtcttttcgccaacattcgccctatccaagtcccaagctccatcacgcacctttctcctttaaaaaaggaaattgttgagaacactgattttgtcgttgttcgtgagttgactggtggactttactttggggaaccaaaacattgggatgagtcagcggcagttgattctttaacatatacccgtgcagaaatcgagcgaattattgagaaagctttcgaaatagctgcgacgagaaataaaaaagttacttctgtggataaagcgaatgtgctagcttctagtaaactatggcgaaaaattgctgaagaagtggcaagtcgtcacccagatatcacactagaacatctatacattgatgctgcggcaatgcttatgattcaacgaccaacgacatttgatgttatcgtgacggaaaacttatttggcgatattttaagcgatgaagcgtctgtcattactggctcacttggaatgctcccttctgctagccatgcggaaaacggaccatctttatacgaaccaattcatggatctgcaccagatatcgctaatcaaaatattgccaatccaatgtcgatgatttcttcggtgtcgatgatgctccgccaatctttctctctttttaaagaagcggatgcgattgatgcggcagctacaagaacaatgcaagctggatttttaaccgctgaccttggtggaaacactactacgaccgactttacaaatgaagttctaaaacaaattgaaggaggagaataaaatggggaaaacactttttgataaactttggaaccgtcatgtcatttatggcaaagaaggtgaaccgcaattattatacgttgatcttcatttgattcatgaagttacttctcctcaagcgtttgaaggactaagactggaaaatcggccactgcgcagaccagataaaacgttcgcgacaatggatcataacgttccaaccgaagatattttcaacatccaagaccttgttgctaaaaaacaaattgaagcactgcaaaccaactgcgcggaattcggcgtaacgctagctgacatgggcagtgaccgtcaaggaatcgtgcatatggttggaccagaaactggactaacgcaacctggcaaagtgattgtttgtggggattctcatacggcgacacatggtgcttttggagcgattggctttgggattggttctagtgaagtagagcatgtttttgcgactcaaacaatttggcaacaaaagccaaaatcaatgggcattgaaattaacggcaaacttccaaaaggtgtatatgcgaaagatattattttgcatttgattgccacgtatggtgttgcttttggaactggttatgccgtcgagtattatggtgaaactattcgtaatatgtcgatggaagaacggatgacaatttgcaatatggcaattgaaggcggcgcaaaaatgggcatgatggcgccagatgaaactacttttgaatatgtgcgcggtcgtgaatacgctcctactgatatggataaagcaattagcgactggaaaacgctccaaactgactccgatgcagaatacgatcttcatatcaaaatggatgcgagtattttggaaccatatgtcacttggggaacaaatcccgaaatgggtgttcctttttcgaaagcatttccggaaattaaagatatgaactatgagcgtgcttatgaatatatggggctaaaacctggacaaacggcggaacaaatcgagcttggctatgtgtttattggttcttgtacgaatgccaggctttctgacttagaagaagccgctcgtatcgtcaaaggaaataaagtgaaaaataatattcgcgcactcgttgtccctggttcccgccaagttcgtaatgcggcagaatctattggactagataaaatttttatagaagctggttttgaatggcgtgaacctggttgttcgatgtgtctaggaatgaatcctgaccaagtaccggacggcgttcactgtgcctctacttcgaatcgtaattttgaaggacggcaaggtaaaggcgcccgtactcatctcgtttcaccagcaatggctgcggccgcggcaatcaatggacactttatcgatattcgaaaggtggcggttatcagtggaggaaattaaagtacacattggaaaaacagtggcgctaatgaacgacaatatcgataccgaccaaatcattcccaaaagtttcctaaaacggattgagcggactggttttggtgaatttctctttgatagttggcgttatctaccgaatcgtaaaccaaacccggatttcccgctaaatgctctagaccgccaagaagcgactattttaattacaggcgaaaattttggttgtggttcttcacgggaacatgccgcatgggcgctacttgactaccgttttcgtgtaattattgctggtagttatagtgatattttttatatgaattgtacgaaaaacggcgtgctccctatcgttcttcccagagaggcacgtgaaaaattagcgaaaattgcagccgaagagaatgtgaccattgacttgccaaaccaacaagttatcagttcagttggcacctatccttttgagattgatgctacgtggaaaaataaatttattaatggactggatgatatcgccattacatttgaacatattgatgcgattaaagcctatgaacaaaaagtggattcaatataagaaaaggtagtgaggatgatggaattagttgacttattagtaacagaagaagatgtcgaaaaggcctatgaagtcttaaagtcggtcgtcaaacatacgccactagaatatgatttttatctttcggaaaaatatcattgcaatgtctatctgaaacgcgaagatttgcaaagagtgcgttcttttaaattacgtggtgctttttatgctatttctagattatcagcggaacaattggaaaaaggagtggtgtgcgcaagtgctggaaatcatgcgcaaggagttgcatatacgtgcaaacgaatgacagttccagctacgatttttatgccaacgactaccccgcaacaaaaagtatcacaagtaaaattttttggtggtagtaatgtcgaagtggttttagttggcgatacgtttgatgcttctgcaactgccgcgaaagaatttgctgcagcacatggccaaacttttatcccaccgtttgatgatcctgatattattgcaggccaaggctcgcttgctgtggagatggtcaaagatttaaataaagcacacgagcaagcagattatgtttttgctggaattgggggtggtggcttgattagcggtgttgcaacgtatctcaaagcgaagagcccgattacaaaaatcatcggggtagaacctgatggcgcgccttcaatgacagcagctttaaaacaaaatcaagtcgtaacactagataaaatcgataaatttgtcgatggtgctgcggtaaaagaagttggtagcttaacgttccaacatgccaaagtgttagtcgatgaagtgacaactgtttctgaaggtgctgtttgttctacgattttggatatgtatacgaagcaagcgattgttgcagaacctgctggagcactttccgttgctgcacttgaaacctaccgcgaggaaattaaagacaagacggttgtttgtattgtaagtggcggaaacaatgatattaaccggatgcaagaaattgaagaacgttccctcctacatgaaggattaaagcattattttatcgtcaatttctcgcagcgtcctggggctttgaaagaatttgttaacgatgtgctcggtccacatgacgatatcaccaaattcgaatatacgaaaaaagtgaatcgaggtaatggacctgtaattatcggtgttttgttgcaagataaaaatgattatgaaggattgcttgaccgggttgctgcttttgacccgagctatattccgattaatgataatcaaaccctatacactttgcttgtataaaaagagttctcgtatgatgcgagaacttttttatattacagtttatacatctgttatagtaacagtttattttgtaattcggtttaaaatcttttgtttacggatataaagtagtataataaacatatagaaattaaactgtattatttaaaaataatttttcatatataacaattcaaggagtggcaaagatggacgcagttagaaaaaatcgattatttcagcattctacaatggcagcacttgttggtgggcttttcagcggaacaacgagtttcaaagaattattacagcacggtgaccttggtataggaacacttgaccaatttgatggtgaattaattattttagacggggaagcttttcaaattcggtcagatgggcaagcttataaagtaaaaccggaagatacgacaccttatgcgagcactacttttttcgatgccgatacttctttttctgtctccgaaccgacatcaaaacaagcggtggaagaaaaaatcgcagaattagtacaaggaccgaatgttttttatgcagtgaaaatgaccgggaatttccgttatgtggatacgcgcgttgtaccaaaacaacaaagaccttatccgccactcattgaagccgtaaaagaacaaccaacgtaccattttgaatatattacgggtacgattgttggtttttggacacccgcttatattagcggtattggcgtttctggttatcatgtgcattttattgatgatatgcgtaaaattggcggtcatgtatttgattatgaaatgcttgaaggaacggtagaagtggcgcaacaaacggaattcgaacttcaattacctcaaacgacggaattcttaagaagtgatttaagtacgccggatatgttggaacagattgaagctgcggaaaattaaaaaaagaaagctcccaaattaaattgggagctttcttttattctgtaataactttatgaacaagggttggcgctattgcatggtcggaaatttgaatgttttcgtagattttcgcttttacattttcgacatcttcttggtcagcgaaaatcgttacgagtgattcgccttccttaacagcatcgcccacttttttacgtagcattaaacctactgctagattgatttcatcttcttttgttgcgcgaccggcgcctagaatcattgcagcgattccaatttcatcagcgacgatttggcttacgaaaccggatgttttagcgggtacttcgatttggtattttgcttgtggcagtttttcagggtgatcaacaatgcttgcatcgccaccttgattagaaaggaacgttttgaatttctctagtgctgcaccgttttcgattacttcgattagtttggcgcgggcttcatctagtgtctccgcttgtttggctagtacgaccatttgacttccaagtacaaggactaattctgttaaatcttctggcccttggcctttaagtgtatcgatggcctcttttacttctaaagcgtttccgattgcttcgccaagtggttgggacatatcagaaatgactgccattgtatttctacctacgttatttccgatacggaccattgcatgtgctaggttttcagcatcttcatcggttttcataaatgcaccagcacctgtttttacatcaagtacgattgcatctgcgcctgctgcgatttttttactcataattgaacttgcaataagcggaattgagtttacggttcctgttacatcacgaagcgcgtacatttttttatctgctggtgtaaggtttcctgattgtccaataactgctactttgtcgcgatttactaggtcaatgaaatctttcttatctagttcgatgtggaagccttcgatagattctagtttatcaatcgttccgcctgtatgtcctaagccacgaccagacatttttgcaactggtacgccaactgctgctacgagtggagcaagaacaagtgtcgttgtatcgccgacaccgccagtactatgtttgtcgactttgattccttcgatttcagataggtcaatcgtatcgccagagccaaccattgccattgttaaatccgcgcgttcttgatcattcatatcttggaaaaagattgccatggctagagcacttgcttgataatccggaatttctccatttgtatagccatcaatgaaaaactgaatttcttctgttgataaagctttgccgtcccttttcttggaaataatatccaccattctcatttctcttcaccctttctttttgtccactttagcattttatgtacctttattgagaacggttacactttttaagtaaaccgttttactaaacaagaacatgtgcttaacatgctcactataacttactcccttactggttgtcaatactttttgtactactacgcttgattagggaaatatcgagtaaacgattctctaatttctcggttggattttggagatttttcagtaaaagttcggcagcaatttcgccgatcccatagattggttgccgaattgtcgtaagtggcggagtcatgtattcggaaagttcaatatcatcaaacccgatgacgctgagatcatgagggatgcgcagatttttttctagggccgcgcgatacgttcccattgccattaaatcattggttgcaaaaatggcgctcaagttttcttggagtaatttttgtgtggcgatataaccgccattcatcgtttggtccccgctgacaatccagctatcttttaccggaagttgataatctttcatacacgccaagtaaccctcgtaacgctcatgtacgttataaaaagatgtatccgaaataatgattccgatgcgcgtatggcctagttcaattaaatgctccgtcgccatatagccgcctttgaaatcatcaattgcgatatttccttcttgccttggattccgctgacgatcaagtaaaatatacggagaacgcttctcttccatacgtttgataactcccgaaagcagaatattagggctggcgataattaagccatcgacagcccgatgtaataattcttctacatataaatcttctcgttctttatcattggaagagttacagagcataatcatgtaaccttctttatttaagtaatcttctgccccttttaccatttgtgagaaaaaaggatccgttacttccggaacaatcattccgatggtgtttgtgtgactaacaatcatatttttggcgaaaaagtttggtttgtaagacatctcttttgctgttttcaggactttttcacgagttaagtcgctaaatcgttcccctttaccattcaaaatttgagaaatcgtcgtaattgaaacgcctgtcttttcagctatttcgcggatggttgcagccatttaaactcccccagtcagattatctattctccttattttgccacatttgagaataataataaaggggtttcattcaaaattagtaattatcaggtttagctggtttttcgccggaaacaattgcaacgcctgcacttgcgccgatacgagttgcgcctgcttcgatcattttttctacgtcttctttcgtacgaaccccaccagatgcttttacaccgatgttcggtccaactgttttacgcatcaaggcgatatcttcggcagttgcgccacctgttgaaaatcctgtagatgttttaacgaagtctgttcctgcttttacagcgatttcgcatgcgcgcactttttcttcgtctgttaataggcaagtttcgataattacttttactaatgctttgcctttagcaacatcgacaacagcgcgaatatcgcgttctactaattcgtcgtccttgtctttaagtgcaccgatattgataaccatatcgacttctttcgcgccgttttggatggcatctttcacttcaaatgcttttacttcaggggtattcgctcctagtgggaaaccgataacagtacatactacggattctgctccagcaagttgttcagcggatagttttacccaagttgggttcacacatacggatgcaaagccgtattctcttgcttcttttgttagggttaaaatttgttctttcgttgtgtctggttttaaagcagtatgatcgatcattttagcaattgtcattttaaaaactcctttaaattgtatttggttttatcatatcgcactccagaacatttgtaaactaattgatgaaattttgttcaagtagttgttttgcggtaaattggtcggtaataaaatgattggcataaccgccacgaagcgcgccatgaatcgcttttatttttcgttcaccgcccgcaacaaggatggctgtttctttttgttttaactcttgcaaattgatgccaatggtccgttcatccattttttcgtcagcaatttcgccgtcaattgtgaaaaatcgcgaacaaatatcgcccactgctttttcttttaggcgagccttttcttgatcagaaaaatagcctagacggaaaagcagggcttcatcacgcacagttcctacagtaaaaatagcgatattggcttttttaccaagttcgatgatgttttttatatggcgatctgcttctaccatttgtttagcgagtggattatcaaggaccacgggaagtggcagtgaaactggggccgtatcataggcagccccgaataatgctaacgtttcagcagcatacgtattgacatcagaatgactcacgccgcctttaagttggacgacttttatttctgcttttagtggggatagtttttgggcgattttatacatcgttgttccccaactcacaccaagaatatcgccatcatggataatctcttctaaatattctgcagcactttggctgatttgcttggttatttcgctataatcatttgtttgactgaaagcaacggtgacgttttttagttggtacttttcttttaaagcgacagccagttctgtgaggttagaaaatggatcttggacttcgattttgacgtatccttttgttttcgcgttttggagcaatctggaaacggtcggtctggaaacacctagacgtgtggcgatttcttgctggccgagatccgcctgataataaagtctcgccacctcaacgctgagttgttctttttgtttatccatttcatccctccatcgttttctttttagtataacgtaagaacggggatagttcgagagggaagataaaaaaagacagccgcagctgtctttttcctattaaaaatcttcttctatttcttcaagcggcgcggcatattcataaatccctaaccgcccagtttcggcaacttgattcgcaagttgttttaaggatagcgtttcacgactgaggaacgcttctaataaaagcggaatattcacgcctgcaacaagttctactgcatcaaaattcccgagcaagcgaacgagcacattaaacggagtgccaccttttaaatcggttagaaataatacgccttctgttaaatcgagtttagctacctcactggcaattttcacctgtaagttttccgcggattcattcacttcaaaaggaacaaaacttgtattttcttgtttaccgcaaatcatttccgcagattgaatgagttcttttgcggcgtttccatgagtacaaacaaaaattgctttcattttctaaaccgcctttttaatagtctaactgacgatagtatcttctgatttccattgggtgacagttaattttttccacgtgtacgtcaatacgattattaactgcgtggataataaatggtgacaacgcccctctgaatttagcggaaatacccggcatatcgtaatcttttgcatcaatgactgtataattggcgcagatttgcggaatgaaattaactactctctcgcttaaagaacgctggctatcttctgtcacataaatggtaatcggggtatcgcgttctacaatttcaaacatgccatggaaaaactcatgtgactcaatcgatttcgttttaatccagtgctgttcttcccagtaacacattgcgtatgaataggtcgcaccccactgattcccagcaccaacgaaataatgaatgtcgtcttgatgatgttttagcgcaaattcttgaccaaatttatctgccgctttttctacttctacaatccctttagcaaaatgttgatccatttcttgataaaacgcaccataatcttcaaattcacctgctaaatacataaaacgatctgccaccataaagaattttaattgttcatttaacggataggagattaagtgatctactaaattagcaagttcggtttccgctttatcaataaacccaaatatagtcgcaccaatttcattacattttttcacagcatctactacttcttgcgtacttccggtcaccgatgaaataactacaagtgtatctttggtgacacgtttattgcctgtagttagaaacacagccgcattttcataaaaagtttctagcgccgttttttctttcatatgcaccacagcttgcatggcggatgcgtatgtcccgccaattcctagccagcaaatattactaaaaccacggtggtgtatttggtcaactacttcattaatttgcggacgtaatttaagcgccccttccatgttttctctcactttttgttcatcaaattttaacactcttcattcctactttctttgattaaattttggattttgttattttatcaaattccggaaaagcggatacttctaaattaattccttttttcttagaaatttcaaaggataataaatgaaccgggatagtcataaatagcggcgtcagaagttctgctgtccgcataccaagtaataaatcatccgcgttttccccgcctgcatccgcataaattgtccggattttctttacatggccttgtaaaaattgttttaatttttccgcgcgatcttctagtaatccttgaggttcaaggaagataatatagtctcgttcggacaaacctatatatggtccatgcatatattcttctagctctttaccaaatgaagtaatccggatggtttctgttacttttgtttctccttcgcgcgctacaccataagcagcgccgtatcctatgaagaaaactcgttccgcttccatcaattcctgtgtatgctcgtccacccaagcagctgatttctctatcacttgtggtaaatgagcggtaatttttttcaattctgcaatttccgcctgatactcttcctccaatattttctcttgtaaaagggctagctcaagcgccattaaattcaacatgagaatggttgcgctatagccaagcgtgacatatggcatctcttctaagcccatcccgagatcaattgcccgcgtactttctttcgcaatcgggcttcttaaatcgctcgttaaagtgaaaacaatacctccttgacgctcaatttcttttacgagatggatggtggagtaactgtgcccaccttgtgatatagcgatgtataaggtgtttttgtttaaatgcagcatgtaatttcctgcagtagatggttcttccacatataccggaatagcaagtttatccgacatatataactgcgctgcgaatgccgcattagaactagaacctgttgcaaaaataacaattgcttgatagtccactttctccatttgaatgaccttttgtaaaaggtcttttcgacttcggatgatattttcataaacgctttgttccgaccggatataataatccatgtttttcattttttcacctacttattttaataaacctgtgaacgctcctaaaatcccaattcctgcgattaataaaagaatccaatgtgcttttagtccttttttatctaaccagaaaataaagaaggtgaagccaagtgctagaattcctgggacgataccgtcaaaaacactttgaatcgttactgcatcatcaccagaaccaaatttcattggcatattaatgtttaccatcgtggcgaccatcgcaccaacaacagccagaccgataaccgaagcaccataagacagtttatccattaatccagttttttgaattttttcgataaagttagctccaatgttataaccaatgaataacccataatatcgagtcagaatagctggaatattgaaaataaggaggaataaaatcggccctaacatatttccttgtagcgctaaggaagttccaatacctgtagcgataactcgtaaagttccccagaagaacgaatctccaatcccactaagaggacccattaatgctacttttatattattgatagaatctgtgtcaaaatctttatctttcgcagattgctcttccatcgcaatggatatcccgagcggaaaagtggaaagccacggtgttacgttataaaattctaaatgtctttgataagaagaaattcgtttgtctttatcatttttaaaaattttgttcagagctggtagcatggaaaatccatacccgagattggattgtcgttcgtagttccatgaccattccatcgtgaacgagcgccaaaaaactttcattaagtcttttttcgttaatacgtcagaactcttcatcttcataatttatacctccatcattcgcaagtgctggctctgtattagtattttttgggccattgtcatttttaagtgttgcataacctgttaaaattagcgctaaacatgcagcgaaaatcgctacgcctgttacaggaacttttaagtaaacagctaacgcgaagccaaatacgaaaaataccgcattcttcttgttgaccatcaatttgagaagcaaagcaaaaccatatgctggcagtaaaccagtcgcgattccaagtcccgttataacgaatgctgggatggcatcaagtacgttttgaataactgggcttcctactaaataggatgtcgcgacaataataccaattggcaagttgatcgataaaaatccacctagtaactgcattcgactaatccctcgtgaatttccctcgagtgcgtatttatctgctttatgaacaaagtaaggtaatacgaaaataaagcatagatttttaacaacaagtacaagggaggcaattggaatcccaagcgctaacgctacggctgtgctttcaccagtcgaaatcgcgaaggcagttcctaatatacttcctgaaataatttctggagggatagatgctccaatagaaaatgatcccacaaaagctaattctaaagttgcccccataataatccccatttgtacatcccccatgataagcccggcgagtgtacatgttacaagtggtcttgatagcatcgatgaaccaaataaatattctccatttgctagcattgctgcaagtgcaagcaaaatcgctgttccaaactgttccataatttatcccttctttcgtcttttatgcttcaaaggttacttttttttcgttaggcacttgctgcataaacacatctactttttctttttgaagctcttttaatttctctacttcttcaggtgttaaattaactgctttggaaaaattggctgttccttctctttgcttcgttccgcctagatttaacatcgggattttaccattcgtaccatggattaatttgtaagcgtcttcaaccgattcgacaacaataagcatgttgtatttatcagtgacacctgaattaatcgcttcgatactttcatcgatacttttcatgactagttttgccgcctctggcttagcaagccgtattgctgacttacgaaaatcgtccgctgctaccccatcatttgccactaaaattgtatttacatctaaagcattaaaccaagatacagctacttgtccatgtagtaaacgatggtctactcttagaaattgaatcattttttcttcctccttagtattagttaaaatcaactacatatttggtcgactcagcatcttcataatgatattggatggcaattggcatctcgttttctgcataaaagacactgctcaatttaaatacaggatcattttcgtttatatgcatatttttgatttgctcattcccagctaaaataagttgaagttcctgctcaagctcaaataatttatatttacctgaattaacaagctcaataatattaataatttgaaaatccttcgcttgtaaatcagggtataaactcaacggtaaaattaaacgatctaacgtgacaccgttctcacttttttggacaaacttgatagaatacacaagttcattctcttttataccaaacttctctgcgtaaaacttgccagctttgcggatgtaaaagtctttaatgtcttttttcaaattttcattggtatcagttttcataacacctgtcatttctaggatattctgggatgtaagttttggttggacgtatagcccaacaccgtttttgcgaacgaccaaaccttcttcgactaataaatctaccgcgcgtcgaatagttgtccgactgctagaaaaaatttcttgcaaggcagtttcgttcggcattagcattcccgtcttatactcatcgcgattaatactatcttttatttctgaagcaattacttcaaaaagtggctttttagctcccatttcactcatcctccaagtaatcaaatatgtttttcgcattgattttgtatttgatttgattaccaattagatattgtttgctgtactcaaacggttcatcattttgatcgaatgctttactcactacttcaaaaagtggcgtgtttaatggtacctttaatgcttctgctagcttttcattcgctgatacatagcgcaattcttcgcgcccgtaggtaggtttaatagcaaactgcttttctaacacattgtatagcaaggaattatttaaatcgattttctcaataccagcaaacctcgtgctatcaataaaagatatttcataagaaaacggcttattatcaactattcttcgacgaactaatttaaacaccggcttttcttcacttaagtttaaaaagtgattcacctcgtctttgccagctactatttcttgtgacattacttctactttttgttctcccggcaattgactactcatggaattcatttgcagtatattgattgtttgcttttggttgatttcgattccttttcggtttcttttttggatgacagcttctttttcaagtgtatcaagtgaccttctgagtgtggtccggctgacacctagttcgttttcaagcgcacgttctgatgggaaacttgtttctccggctgctactttttcttggataagctgtcttagttgttcttcactttgcactgctggcgacaagtctttatattccatatttccacctcttttttcaaatcatctatctatttcactttttcaaaagatacagctttaaacatttttaataccacttcattgtaaacggttgcattttgtttgtcaatagtctttttacataaaaaaaagcataaggtagattttccaatccaactcatgctctgtttgattatttagttgtaggcagtgctccaactactgggtgcgggatgtatagttcttctagatagttaacttccgaagtggttagtttaatatttagcgcctctaccgcgctttctaggtgactttctttttgcgcaccgatgattggtgaagtaatttcatctttgtttaataaccatgctaaggcaattttatctcgagatacttgatgtgtttctgcaagttcagctacacgttcaataatgcctttatccgcattcatcatgtcatcgtatttagatttttgaactgggtccgtttcggaacgatctgttgtttcattcaaatcacgtgttaaccgacctgatgctagtggactatatggcgtaatcgctattttttcatcgcgacaaaacggaatcatttctcgttcttcttcccggtatatcatgttgtaatgattttgcatggagacgaattttgtccaaccatttctttctgcgacgcgttgtgctttttggaactgccaggcatacatcgcgctcgcaccgatgtagcgtgcttttccggacttaacgacatcatgtaatgcttccattgtttcttcgattggcgtattttcatcaaaacggtgaatgatatataaatctacataatccgtttctagtcgttttaaactatggtcaatttcacttaaaatggtttttcttgataaaccgccactattcggacgatctgggcgcattgtttgttgcactttggttgctagaacaatatcatcacggttggcgtagtctttcagtgcgcggccgacgattttttcactttctccgtaggaataaatattcgccgtatcaaagaaatttatgcctaaatcgagtgctttttttatgatagggcgactgtttgcttcgtccaaaacccatttatgaatccatttgtctttatcaccgaagcccattgttcctaaacagattttcgaaacatccatgccagtgttaccaaatttaacatatttcatctaaaaccctcctagttaatttctagtactactacagcataaaccttgaagttcactccaagtcaacctttaactattaaaaaaatctcccggaatatccgagagatttttaatgttttaataaaattggtcaggtagtaaagtttcgccaagtttgatgttatcacggtaatcaattggaatatctacaacgacgggtccttctgtttcaagcgcttcttttaacacatcagaaagttctgctggatttgttacgcgaagaccttttgctccgaaactttctgcaaattttacgatatcaacatcgccaaaacgaacagctgcttctttgccgtatttcattttttgttggaaagcaaccatgtcatagcttccgtcattccatactaggtgtacaagtggcgcacgcaagcggacagctgtttctaattccatcgcggaaaataagaaaccaccgtcaccagaaatcgaaaccactttttcacccggatgtacaagtgttgcagcaattccccaaggaagcgcaacaccaagcgtttgcataccgttactgaaaagcagacggcgtggttcataggagcggaaatgacgtgccatccaaatataatgtgaaccaacgtcgactgtcacagttacgttgtcatcaattgccgaacgtagtgtttgaatgaccgacaatggatgtactcggttagtttcatcactttctggcggaacatctcgctcttctaattgagcatgaagttcttttaatgtttcaagttctttttccgctaattctaaaccgctgaatttcgcattcactcggtctaaagtaagcgcgatgtttccgactagctctgtcactggttggtaataatgatcaatatcagcgcgaatgtcgtctaaatggacaatcgttctatcaccagaggcattccaagcttttggatcgtattcaattggatcataacccactgtaataactaaatcagctttatttaacaaaatatcccctggttggttgcggaacagaccaacacgtccaaagaagttatcttctaagtcgcgtgaaatgacgccagctgcttggaaagtttctactactgggatacttgttttttggagtaagcgacgaattgcaccagttacttctggactagatgctcgcatacccaatagcaataccggtaatttcgcttttttcaaacgtgtaacaagttttgcaacttgttctttggaagcaggaccattttctggtttagcaagtgggcgaatcgcttttactggtacgtttggttcgttcacgatatcttgtggcaaactgacaaaagcagcgccttggtttggttctgttgccgagcgaaaagcgttagtgattgcttctggaatactttcggcgtgaactacttcttcgctgtattttgtaatcggacggaaaagtgctgcattatccattgattggtgggttctttttaagcggtcttgccttgttacgttaccagcaatcgcaacgactggatctccttctgcagttgcggttacaagccctgttgcaagattcgatgcgccaggtccactagttacaagtacaacaccaggtttcccggttagacgaccgatagcagcagccataaacgccgcattttgttcatgacgactgacaattaattctggtccacgttcttccatcacatcaaaaactttatcaattttcgctcccggaatcccgaatacatgcgtaacaccttgattaattaagctgtctacaactaaatccgctcctgatttcccttgtgttattactttttcttggtctttttctagtttcgccatcttcatcatccttttgttatataaattatcaaaatttcaatagtacagttttcaaaaactcttcatttacaagaattattatactacttaaaagaattattgcaaggttcttgactcaaaaactgttatataattatataaaaactgttatatataaaaaaagaaaagacttagataaactaagtcttttctcgcatttattcttgtgaagcacggtattcatcgtattgtttttgcatttctttcattacttttttcatacctgcatcatttaacttcgctttgaatttttctgtatattcaacaggatccactgttcctgtaagaagcgccggtgcaaattcattacacacattggtaatcgaagctatttcagttcgaactttagaggagtcaaaatagaaacctaagcccggtgatgcgactgattttttattgaattctttaaattgatcccatttatccgctggctcatcttcatataattttagaatgaagtgatttccaagcgcataagttggcatgctgtaacgctccacacgtgctggtagatcttgaattttaccgtcatctaactctttataatgggttccttcaattcctttatcgactaaattacgtaaatactcatctgtgtttagtaaatcaaggaatttcactgcttcttctgggtgttggctcgtaacagatacagcttgaatcgcaccagttacagaattatttttgatgataggtgtttcagcaattggttgtgtgactactttatatttgccgcctgtatttttatcccaaatattttctgcatatggttggtatttttcaatccgcacaaaccagttttctttatcgtatgaccatggatctgttgaggttgcaatatcttttgtgacataccctttttggtagaagctatgaagagactttaggatatctaatgtttcgggttgttcatagaagttaacgattttgcctgtatcttcatattgatttactgcaaaaggaagaggtactgcattatcgattaaataatcatatgggaatgctggcttaaagtctttatttccgccgattggtgtgatgcttggttcgttttctttaattgtttttaacattggttctaaatcgctgaaattttttactttcgttacgtccattttatatttatcgacaagatttttgttaaaaacgtatacttgttgctcgccgacttctttgttggaaggaacaccgtaaatgttcccgtcaatggttgcaccttcccaaagcacatcatttaattccgctttcattttcttgccttctttatctagatatttatttaatggcaagaatgcacctttttgagagtaagaaacgaattctcccgctgcagagtaagcaatatcaaaattttcacctgagttaataacggtttgcatccgtttaccgtagtcgccccagtcgatttgtgtcatttctactttgacgccaattttttcttcggtatatttatttacttctttcataacttcttctgtgtctttttgtggcgtaccaatcatgtaccatttcagtgtcggaacttcatttgcatctgccttctcatcgcttccgcatgcgcttaaacctagtaacaagcatagtgacgcgatgattactccccatttctttttcattaaattccctccatctttttttattcttttacgccgccaattgtgagcccgctaataaagtatttttggaaaaacggataggtaatcgcgattggtaacgtcgaaataacaaccatcgccatttttgcaccgtcttgtggtatggacttaaacgcgccggcagtataagcaatttctgagttttgtcgcatgaattctaagttgttttcaattttcataagtagcgattgtaatggaactaaatttggattatcaatatagagtgacgcttggaaccagtcattccagtatcctagtgtagagaaaagcgcgattgtcgcaagccccggtaaagaaagcggaacgaccatttgtaaaaagattcttagttccccagcgccttcaattcgagccgcctcaagtattggttctggaatagaccgtaaaaagaacgtgcgcataatcataatgtaaaaagcattcattgctagtggtaaaatcattgcccatatgctatttcgtaagtgcaaaaattgtgtcataacgatatatgctggcaccatcccaccactaaataacatggtaaaaaaggcaataaatgtaaattgacgacgatacttaaattgtggtcttgatatcgcgtaagaataaagcgcaatcatcgcaacactacatacagtaccaattactgtgactaaaatggtgataccatatgattgtaatagttgtcctttcatcttccataagtattcatatgcttccatgctccactctttcggtattagttgaaagccatttgccgccagagatgattcactcgaaaaagaaataacaataatatataaaaacggaaaaatacaaatgagcgctaggaaagcaagcataatattcatcgctacgttcatctttttcccaaaaccaataatgtctttggctggtttattttttgccggtttttccatttcacctcggacttgttctatttcactcactgcttcaagctgttctgccaaagcacctcgcctccttttctaaaataagccatattctgggtttatttttttcacgatgtagttagtgagtagcactagaataaagccgacaatcgactgatagaaaccagctgctgcactcatactcatatctccaagtgacgttaaaccacggtatacatatgtatcaattacatccgtcacaggataaagtggccctgaatttcgcggtagttgataaaacaaaccaaaatcagagttaaaaatcttcccgacattcaaaatcgttaaaataaccatcagtggcgttagtgccggaattgttacatgtctgatttgttgccatttaccagcaccatcaatcatcgccgcctcgtagtatgtacggtcgattccagcaattgctgcaaggtagacaatgcttccataacccaagcccttccaaacattcatcatgatgaggataaacggccagtattttggatcgttataccatgaaactggatcttgtccaaatgcgagtaagatgttgttcatcagtccactatcttcactcaaaaagctaaataagaaataactcacaacaacccatgataagaaatgggggaaaagcattcccgtttggtaaatttttgctcctcgtttatttagtaagctgttgaaaataatagcaagcgctacaccaagaaacagccctacgataataaatactaaattataaagaacagtgtttcgggtaataataaaagcgtcgtttgtttggaatagaaatttaaaattttcaagtcccacccagtcactgctcataatactggataaaaatcctttcccatcaatcttgtaatctttgaacgcaattactgtaccaaacattggtaagtatgagaaaaccaggaaccaaaggacgcctggaagtaccattaatagccaaatccgattagctcgaatttgtgataaaacttttttcaatccatccacccctcttttttgtaagtgctttcaacatctttagtttatcgtttttacgagggttaaaatagttgcggatgtttagatttatagacaaatattagaaataatcttattgatggatttttcggtaacgattcggtgtttcgcctgtgtgctttttgaactggcgataaaaataagccatatcggtataaccagatttccctgcgatgatggttaagttatcttttgtttgaagcaattcttcttttgcatagttgacccggtagcgatttagataatccgtaaaatgttcgcccatttctttttgaaaaagttgaccgagataaactgcgttaatatggaagtcgtttccgagcgttttcaaagacattccttctgcgaaatgttccgtgatgtaggaaagcacattttgaataatagggctttttgattcatcggtttgtttcttgcggttatagtaacgaatagcataggctagtgtcgcctcttccaatccctcaatacttgtttcttcggcaattctccccatagattcacttaattcttttggatccgattccgccatcatcacaagtaactcattcaaaatatgtagcatttgatgcgggtcgctttccagtttatggtcattccattctttaaaaaagttatttatccaagctttaatttctttttcattattcatcacgaggagtttcgcgagttgatgttgttttctcttcggacgccaagtatgtttcgtacgtttttggtaggcgattagactaccaggctcttggacaagccgttctggaagcagccttgtaagttgacgaaaagcttgtggatacatcatttcaccctgaactttttcactaataaatagataaaaagcttcatttgaaattcgttttttcatatcttgatgaattgctaaaatttgttcggatatcgaagtttgttcggttattccaactattatttcattttctggtgtaagtagcataaatgaaaagtccttgcgatactgttcagaaagatttttccattcggccagatcgatttctttcgttgcttgaatttggatgagcacagcgttttcttttggatttaaggccatatcatacaacgctagacgctcttcccattcttctttattaattcgtaaatttagccaacgccaaatcgtgttgtcccgtaagatgtaatacgcttcttcccttggtatcacactgtctgtcatttgttttttctctatttgtataagtgtttcttttaattcttgttcgtttaaaggttttaataaataattttcgattcccgctgaaagcccgcgtttcacataatgaaaatcttcaaatcccgaaagaacaatagttttagtcgcgggttgtcgttttttccattcgtcgattaattctaaaccgttcattacaggcatctctatatcggtcaaaaggacatctacttcttgattagcaaataaatctaatgctactgcgccatttttagccgttccaataatttcaattgattgctcgaattctggaataatgctctctaaacctttgagaataaggggctcgtcgtctactagtacaatttttagcattacttttctcctcccgtattttgaggtacttgaaacagaatgatggtaccttcatttgctttactcttgattgttaatcgataagtttctccatacaaaagctgcaatcgtttgtttaaattagctagaccgatgtggctcgtatcatctttactttcaattgttgcttgcacctcttttaatttctccgcatcgattcccgaaccattgtcttcaattctaaattgcaaattgttattttctgctgtgaccgtaattacgactattggattttgattttctttataagcatatttgaaaaaattttcaatgagcggctgcagagcaaaccttggaatctgagtatgattgaaacgtttttcaatattgatttccagcttaatgggctgttcgtggcgcatttccataaagcggacatattgttttacataattgatttcttcgcctaaagtggtgatttcacggtgattggccgtatagcgtagtagtgttgcaagctgataaatcatatcacttgtcgctttggctccttctacgcgtgcattcattctaattgcctctaatgaattataaagaaaatgaggctgcatttgaccttgaagcgctttgagccgtgctttttgttcctccatttctaggctatatactttcttcacatatgcatcgaggttttctgtcatatggttaaatcgctcgctaatcatcgtcagttcatccccgttattatcgactggaagctttgcatcaagcgtccccttttccacccggttcattccgccaataatcgttaaaatccgcttagaataacgtctactaataacaaaattaatgctaatagaaaaaataactaataacagtccaataccaaataaagtaagttcgatgagcggcgcgctatcatctgttacacgatataaaaacgtattgtttttcaagccacttgtttcatcttccgttttttgaaaatatatttttttgttgtctacattaatccaaccttgtttttcaggtgtttgtatttgtttcgttggatggttggaatataattcagctcctttcgcattatttatttggaaaatcgagttttgatagtcttttgtaacccatttgcttagaaaagtcggatcaatgtaaaggagcagataacccatttgttttaatgtgcttggatcattaatcggctgtttcacgacaattttattttcgattgtataaaaagtcccttgcttcgatgcttcggtggcgatattttcctccccatatgtatcaacggtttctttccattcacgataacgactcgggaaagtataagagtaactcccatcatccgaaatgagctgaagtgcgataatatcttcatcatacgaaaaataagactgtaaatacgtttgcatatctacagaataaaaatttttacttttaaaatagttatcgatattttgctccgtgtagctaccgtaatcgtttgtcatcgctatttgaacatcttgcatcaaatcactattacgataaatatcttgcgttaaactaattaatgccttttgcttctccgtaagtgcatcgagctgcttattcgcaatagtttccgctctttggagattggtatctagttgaatattagtatagtacttataaatgaaaaaaagtaataagctgaccgtaaaaagacttgttaaagaaaaaattaataacatccttttgaaaacgcgcttgcgtggtaattcttgtgccatgctcattcactgccccctcttcttttctgattattgcatactatcaccaataatgtaaggggttacttaggctccatttgcttgaagcggtgtaagttgattttcattatccaataacttggtaaaacaccagaaataaacaaaataaaagcaggcattttcgaaattaaccatgcgcaaaaaactagcccaataacaatcataaaagtatttttaaaactagtaatcgcgagcaagaacgcttgcccgacataagctcgcacatttttcatttggaagtggacaaacaccgtgaaatactgcaaaaaagcaatccccacgagaaaaagcaagaacattaagaagaagtataaaatcgtcgaccaaaaaccttgcatcaattcaaaaacaatccgcaaatctgcataaagaaaaatccctattagcgcaaaaaccccacccgctaaattagccgaaacaaacacctgtttataggtttgccaagcagatttccaaactggcgtatccaagtccccccgagcccattttcttgttatcgtaaacaaagcaaccgtcgctggcataaagccaaacacaatcccaccaattaatacgaggaaaagccatactaagtttgtccagacgagccggataatccagtcgctaataactgagaatttatcaataagtttcattcttcttctctcctttgatagtaagagaaagcctgagttttcgctcagacttttctttttttatttacttaatgggcttcctttcacatacacaccgcacaaacttaaaacaaattcactaaacatcgcattagaccaagcaaaccagtcgcgcgtgaattcagctggattcgaggcattgacaccctcgtgcatataatccgttccaccatcgccagcaatcagcatctctaaaatagcttgtttttccgcttctgtttctgcagtcaatccttcgatgctaagcgcaatcggccatacataatgatcaggcgtatgtggactaccaattcctgtaagtacactgccttcgacaaaataaggattttcccgacttaaaataagttttctggtcgcttggtatgcggggtcagttttttcgcaaaaaccaaggtatgttgcagcaagcaagcttggcacgttagcatcatccataaataatttacgtcccgttccgtcaacttcatacgcgtaaacatcgccgtaatacgggtgcacttgtttggcataggtttcaatccctgcggcaacttcttttcgtaaatccgagctctctttcggcaattctttatcttccgggtaaaacgtcgctgcgatttcttggacgtaatccatcaccacaactaaaaacatgttactcggtacaagatagccgtacatacacgcgtcgtcactcggtctaaagccactccaagacataccagtatagcttacatctgttccttttccgttattatttaaggtatctgattgacgcacattttctcgttcaaaacgatacggactttgttctgtatgtttttgttcgattttaaagacttcgatgatttgatgcaatgcttttctaaattcttcggtaaaatgacctgtacggttggtgcttttccataataggtacgctaattgaatcggatagcaaagtgaatcaatttcatattttcgttcccaaaccaggttggtcattgctgttttgtcgttttgaaatcccgccccattcgccgatttattaaaagcattcgcgtatgggtcatgcaaaatacatttagtttgtaactttacgaggttttcaataacagtcgccatttcttcgtcttcttccgccacaattaaatatggtctaatttggcttgtagaatcgcgtaaccacatcgctggaatgtctcctgtaataacaaacggaagcccctcttctgtttcttgtaaggtagttgtatacgtattcgtaaaacatttttcaaacatgcggtgaagtttttcgttttccggaaaagtcgttttcactttctctatccatttgttaaagcttgctggtactttgtttgtcatgtattacactccttttaaggtgatgatttcgtttggactagcagtaaattgtttcttggcatctcccgttgtttcttctaaaattgttgatttctgccatggacgctcagttgttaatagttttggttcacttgcagtttgatagaaacggataatcggttggttgtctttagcgattttaaatgctgagaagacaaatccatcctctgtttcccattctgcaaaatctctgttttctgcgagaattttttctttcgttgctgatttgtgttggaatgcaaaaataggagtcaagcgtgcgtttacttgtactgggatggagctatttgcgacatcagaatcatcagtcagaaataagtgaaactctgctgtaatctctcggtggcattccgcttcatatgccggaaaatcaccccaatcgcctatttcagatactgcgcgaagcaacgttaattccaatttgtcaccatgttcgcttacttcatattctggtaaaccaagacttgcgacaacgatatttccactagcaacaaagccttgttttcggttatctttagcaggattcgtccattctttgacttgtttattcgcgcgtgttactacttcaaaaacgcttcccgcttgatgtgtttctgtttgttttccagtcgggaaaagtacgcggagtcgatggtcatctacgttgttatttagtttcacgcggatagttaattgtttatcgtgtttgtttagcgttaattctgtcgtgattttaaatgtagtaaaattttccgagcgctccgactgccgatccggatgccatactaggcgacgtttttcttcggcaaaggtggcacttgcgctttctggtatttcaatttcatggtttatttcgattgtcttgccgagtttatcctctcgtagtactcgaattgctggtttggaattaagtgtatttattcgtaagttatcgccggtttctttaaacatatattcattaccaatgtcgcccacgtcctcataagccccaacacctgaaacttctaccgacgtctctttatctaaaatcgtatacgtcccatttgccgcaacttccacttttaaaaagcggttttctaaagagaaatcttgtgtttggttcgctgattcattcaccaaatcgaccgaatgcgcgtatattgtttcataaccaaccgctggcaaattttctacggcgaaggttagtttgtactttctcgcaaaataagaatcgcggaatttccgttctggcaaatcgtaattgaaacgaatgccaagcgactcaactacaaccggaatttcctcgccggtacttgtttccagccgaaaactttgctctggaagtttcgctaattcatccggtattaattcaaaatgcatctcagaaaaatgaattgcgtctgtttcaatttcaagctctactgttctagtcgcttcgataccacccgcatgaaaaaccgtaagcggaatacccgtttcattcgttgcgatttgttccgttattcggcgcgcggcgttttgaataattgccatagtcgtttgttcaactttttcaaaacgagcttccatttcgcggtgcacctcatccaaactacatccagtaatactgtcgtggatttgattttccatgagcaatttccaagcataagctaagtattcatgtggatattgaacaccagcttctgtccccatcacagaaatcggttcagccaatcgctctaataaacgctctattttcgcatttgcttgtttcaagtaaatacgtgacgatgctgtgttagcgagcgtggaccatccatctgattgttggctcgttaattctccgtgaaccgtttgtaattttcctggctcaagaccagctttgacagcctcttggtatttttcaaaatggctatggataaactttacatcaggataaagttcccgcgccacttccaaggcttccgctaaatcagtttgcactggctgatgatcacagccgttcataaatagccattcatccgtcgacgcgaaccgttccacatccgctaacttcttatcccagaaaacttttgcggcttctttatccaccggaatttcattaccattggaataccaattcgccagtaaaatccctaagactttcgaaccgtccgggctttcccaaaacatttccgaatatttcgaggcaaaagcactatcaaaaacttgattgttaaagcccgttggattgactccacgaccgaaaacaactgtatcaaaaccagcttggcgcatgagttgtggtacttggccatataaaccaaacgtatcagggaaataaccaattttctctgcttgcccgaattcctctgccatttctaaaccatactgcaaattacgaatattcgcttctccacttgttaaaaaagcatcctgcaacatataccacggtccaattcgcagtttcccgtccgcaaccagctgcttcattttttcctttttagcgggtttcacagccaaataatcttctaacataatcatttgtccatccatatgaaaatgatggaatccatcttccttatcaagtaatgcttctacttcgtccatcagtgtaacgagcctaaatctcaaactttccagtggtaaaaaccattctctatcccagtgagaatgagaaataatatgcgctttctttctagtcattttgcccctccaaatatcctttttgtattcgctttcaagctaagtatagtaagggctagagtgaattgcaatgctagccgaaaaactactatgaataatccattttcccttgatttgtccattagaagaaagcgtaatccttcccactctaaggaaagtttctgtcatacctaaaaaaagccaaattgacatcctttcccgctatgatatattgaaaccgttctagacaaaaatagaagggatatgagtatacatatgtttttcactaaagataaactacgaggcaggctagatgaagttgcgctttatcgttacgaaaaaacttatcctatccgtaatttccaaacagccgaggatatggatggagaaattgctgcacgaccagataacatcttgtatgataacgaattaactatcggggaaaactggtcaggtagggatcgttatgtctggctcaaaacaacaattacttttccagacaccaaaactggcacgcgtttgattggctactttgattttggaaataccggcgacggccacaattccggctttgaatcactattatttgttaacggggaaccatatcaaggcgtcgatcaaaatcaccgcgaagttcttttcccagatagttttgctggaaaaacgatagaactggtctttcgtttatggtctggactggaaggtggcggaactcctactatccagacacaccagttaaaagaagcctttattggatatttaaatctcatgattgacgatttgtatttcacgagtaaagcaactttaaaaacactcgaccaactcgaagaaaaaaatccaacctatgccccactcctccaagcgattaaccgcgcttaccttgcgattgattggagtacaccgggatccatacaaaatcttatttcgatggaaacagctaatcagaatttacaagctgctctgaaaaaaataccgaaaaactttcctattaaagtggcggctgttgggcatactcacatagatgtagcatggctatggcgcttaaagcatactcgcgaaaaagccgcacgatcattctcgaccgtgcttcatttaatggaagattaccctgaatacttatttctccaatcgcaaccacaactttacgcctacatcaaagaagattacccagaaatatatgctaaaatcaaagcgaagatcagtgaaggaaactgggaagctgacggcggaatgtggcttgaagctgattgcaatattcctagtggcgaatcgctcgttcggcaaatgctctacggtcagaaatttttacgcgaagagtttggtaaaccttctagttttctatggttgccagatgtatttggctatagctgggctttaccgcaaatccttcgcaaatcaggtattaagacttttatgacaaccaaaattagctggaatcaatataaccgcatgccgcacgatacgttccagtggcgtgggatggatgggacggaaattttgacccatttcattactgccccagaaaaaaatagccgcatttcaacctataatggcaaaatgacagcgcgcgaacttgtcggtctttgggacaaataccaagataaagaagtgaaccaagaattattacttgcatacggctacggtgatggtggtggcggtgtgaaccgagaaatgctagagatgcgccgtcgttatgacgcgatgccaggaattcccgaagtaaagccaaaaagcgccactacatatttcaacgatttacacgaaacgataaatgcgaccgatcaatatgttcatacatggaacggcgaactttacttcgaatatcaccgtggaacttatacgagccaagcctttacgaaaaaaatgaatcgaaaaatcgaactcggcttacgaaatagcgaatggctttccgttttagcaaatctaaaacaaggcataacttacccaactgaaaaattagcaggcatttggcaaattttacttcgaaatcagtttcatgacattattcctggctcttctataaaagaagtctatgacgatgctctaattgaatacacggaagctatgacggaaaataacgtgttaatttctaagcaattggccagtttaacaagagcagctgaagaaaaaataacgctttggaatagttccacatggaccagaccacgatacatcgaaatttcacctgaaaacccagcggaccatttagccttttatgatgaaaataatatactgctgcctgcgcaaaaattagtaaataatacttggcttatccagcatccaaacttacctgtgcttggtgccgcaactatttctgttaaagaaacaccgaacattttaggacagtcatcctttaactacaacaataaacaactagaaacaccattctatcaaataaaatggaatgaagtcggacaattcacgtccatttttgacaaaaaaaataaccgccaagtactagcggaaaatacgcgaggtaatgtatttcaattatttgaagataagccgatgtggcatgacgcctgggatatcgacctattttatcaagaaaaacaaaatgaaatcaccgcgctagattcagttgaaataacggaaaaaggcccgctccaattcaccatgaaacaagtgctacattccgaaaaatcacaaattacccagtggattcatttttatcacgaaagtcctgaaatccgatttgaaactgaggtggactggcgagatcgcaaccagttgctcaaagtcgcctttcctgtcgacgtgcatgcaagtgaagctagctatgatatccaatttggaaacgtcaaacggccaacgcactggaatacaagctgggactatgcccgctttgaaactgttggccatcaatgggctgacctttcagaaaagaattacggtgtcagtttgttaaatgattccaaatacggctatgatattaaagattctacaatccgtctaaccttgcttaaggcagcgggctatcctgatccagatgctgatttaggaatccatcaattcacttattcgctctatccacatcaaggcgatttcttagacggggaaacagtccaagcagcctgggaattgaataatccaattttcacttccaacggcgaaattgaaactttttctcttttccaagtgacaaatccttacgtgatgattgatagcgttaaacaagccgaggacgggaatggcttcattctgcgcttgcatgaatttgcgggaacgcacggtgaagtgacattcaatagtgattacaccattacttccatcacagaatgcaatctactcgaggaaaacgaaacatcacttcctacaccaacatttacaatagctccatttgaaattaaaacataccgaattcatttagcataaaaaaacacgcagcaaggcttctccctaagaagtccgctgcgtgtttttattagtttaacgtgaacagattaaagtttagtaactttttctgcttgtgggccacgttggccttcaacgatttcaaattcaacgctttgaccttcgtctaaagttttgaatccttcaccttcgatagcgctgaagtgtacgaatacatcgtctccgccttctacttcgatgaaaccgaagcctttttcactgttaaaccatttaactgtacctgtttgcatatttcacaaacctccaaaaattttcttaatatgtttcttttactaacgaaaaagatgttaacaacaagctaatcattttttcaattacaaaattcacatattagcaaagatactcacttcacatcaatatccttgataataagtaaattagctactatcaacacttatatattaacgccaacgagcaaataaatcaagtgaaaaagctgtacggttacaaaatagattattcagtttactatctgaaaaaccctgctataagctaattcttataacagggtttttatattattctgtaatacttttatctttaatccgccatttcacaagtaaattatgtaatggttttcgtactaagaaataaacacctagcgagataaacaccgatgctgtacccaggaaaaatccgccaagtacatcagtcgggaaatgcacaccaagataaacgcgtgtatacatgacaaacaggatgaaaccataaccgataatgccgataacgattttttgccacatttttggtacagtgaaaatcaagaacatcgctgcaaggccataaaaaaccgccgttgccgttgcatgtccacttgggaaactaaagcctgactcgctcactaaccaattcacacttgccggacgcgtccgaccaaccaaacttttcaaaacaagatttagtactacgccacaaacgagcatcgttccaccaaaccaaagtccgacaacaaattttcgtaaaaagaataaaataagaacgactacaatggtcaaaatgattgttgtttctgcgcttcctagggtagttagaaatttaacgatggctgttttatccggttggatgccactacggattttttcaatccaacttaggtcaaaacgtgctacccagttactttctgtcgcaatagcggaagcgatggtaataaataaaataaggcaaaatccgccgataacgaatagcggtgttgcttttttacgatttgtattcatggttaactccttttcattcggttgtttttagaaattcttttacttcttttacaagctcttgatactgtgcttgttctggtgtcgcttcatttgtaagctcagtaactgtgtcgctttcgtagctaactgaccccgtgctaacaaacgttgcattaccaattaattgtagcgaaatatcaccagcttcgtcttttttggcagtcacttgtactcgcccaccatcattataaacattaagtggtgtttcaaaagtatccttatctaacatttttttaattaaactacaagctgacatcgctgtcccgcatgcattcgtaaaacctacaccgcgttcaaatgtccgcacataaatcgcatcatcgcttaatcgtttcacaaaactaacattgacaccatctggaaaataaggattttcgctgtttaaataactcgctaaagtttcttgtctatccgagtctaacacggtttggtccacaaatgtaatcaaatgcggattaggaacagaaacagcagaaaaagcgagttctgcatcaagttctggaacaacttgattaaataatttttccacaccgacattcattggtaaactttctgcgttaaatttaactggagaaatttcgacttggtacgttggaatatcaaaaccaagcgaagtcgcttttttgacatccagtatcgctttcattgtttcgacttttgcttctgttaatgcgtgcttttcaagtaaataacgagctaccgttcttaggccattcccgcacatcgacgcaatcgatccatccgagttaacgacacgcatttggccaattggtccagcttcactgctttttgtgacatataaaattccgtctgctccaccaagcgaatgttctctatcacaaagctttattgcaaaatcagcacgtttcgcatccgaccaatccattatttgatttccctcttcatcaactaagaaaaaatcattttgcgaaccatgtacttttgtaaagtgaattgttgccattacgtcaagcaacctcctttatttggaattacgtctataataccacatcttaaattaaaaaagcttggggaacctccttttgaaatgagtaggattttccccaagcgagcattaagcttcgtagtgttttacaacaatatccgcacagcggccacaaagtgttggatgttttggatttacgcctacatcttttttcactacacggcaacgttcacaagtttcaccttcagctacagtaatttgaacagctacttgatttgatttgaatgcagattctggtgcattttccaaaccttccacaagttcaaagtcagaaacgataaacagttgtgcaaaatcaccttctaaagaatcaaatagtgttttcgcttcgccatcaacatataaagttacttttgcaagcattgatttaccaattaatttttcgttacgagcgaattctaaagctttttgaacgttatcacggatttgcatgaacgcgtcccatttcgctgtaatttcttcgctattagctaatacttttacatctggtaagtcttgcaaatgaatactttccgcgccttcaccgatcaagctattccaaacttcttctgttgtatgcggtaaaattggagcaagtaatttggttaacgtaacaaccgcttcataaaagactgtttgcatagcacgacgatcatgactatcagccgcttcgatgtaaacaacatctttggcaaagtccatataaaattggcttaattctactgtacagaaattattgatttggtggtaaatagtagagaattcgaaagcttcatagctatccttcacatttttcactaaatcatttaatttaattagcatatatttgtctacttcacgtaggttttcataagaaaccgtattagtagttggattaaagtcattgatatttcctagtaagaaacgcattgtgttgcggattttacggtatacttcggatacttgttttaagatttcatcactaacgcgaacgtcggcttgataatctactgaagcaacccaaagacgaacaatatccgcaccaagttgtttaattactttgcccggaagaagggtatttccaagagatttactcattttacgaccttcaccatcaagtgcaaaaccatgacttagcacattacggtaaggcgcttcgccagtgattgctacagctgttgttaaagaggagttaaaccaaccacgatattggtcagagccttccatgtacaaatcagctggacgacttaattctgggcgagcattcagcacagcttgatgactagaacctgaatcaaaccaaacgtccataatatccgtttcttttgtaaattcgccatttggactacctggatgcgtaaacccagcaggtagcaagtctttaacatctcgctcaaaccaaacattcgaaccatgctcacggaaaagttccgaaatgtggttgattgtttcgtctgtgataatcgcttctccattttctgcatagaaaattggtagtggaacgccccacgcacgttgacgagaaataacccaatcgccgcggtcgcgaaccatattaaatagacgtgtttcaccccatgctggagtccagttaacacctttaacagcagctagtaaatcatctcggaatgcgtcaatcgaagcaaaccactgtgctgttgcacggaaaataactggttttttcgtacgccaatcatgtggataagagtgagtgatgaattccatttttagtaatgcgcccacttcttctagtttttctgtcaccattttattcgctgtatcataaaatacgccttcaaaccctggtgcttcctctgtaaatacaccgcgatcatctaaaggagcaagtatttctaaatcatattttttcccgattaaaaagtcatcttccccgtgtccaggagctgtatgaaccgcgcccgtacccgcttctgcagtagcatgttccccgttcattactaaggaatcacggtcatagaatgggtgttttgttacaacgcggtcaagttcagaaccacgaaccgttttcacaactgtcgcatcttcaaagcctagtttttcacgtaagcttggtaaaagtgcttctgctacaacatatttttccccagcggattcaatcacaacatagtccaaatcagggttaactgtgatacccatgtttgcagggattgtccaaggagtagttgtccagatgacaatattcgttccttcatctagtacaccttttccgtctgttactttgaaagccacaaaaatcgacgcagatgttttatcttgatattcgatttctgcttccgcaagtgcagattcacttgaaggagaccaatacactggttttttccctttgtagatgtaaccttttttcgccatttcaccgaagactttgatttgctctgcttcatattctggtaaaagagtgatataaggattttcccagtcaccattaattccaagacgtttgaatcctgtacgttgaccgtctacttgtttcatcgcatattcggcacaaagtttgcggaattcagcaatagacatctctttccgtttaacgccttttttggcgatagctgtctcaattggtagtccgtgtgtgtcccaaccaggaacatacggggagctgaagccagccattgatttataacgaacgataatatctttgattgttttgtttagagcgtgacccatgtgaagctcaccattagcataaggaggcccatcatgcaaaatgtacgtcggacgtccagcatttttttcttgaattttctcatatagcttttcttcttcccattttgcttgccattcaggttctttgtttggcaaatttccacgcatcggaaaatctgtttttggcattaataacgtatctttatattccatgttttcttctcctttaaaactttatttttaaacacaaaaaaatctctcccaaaaaagggacgagattcgcggtaccacccttgttgacatgcattttaactgcttgcccacttcattaatgccataacgctggctcgcgctaacacttactcaagcggttgctctttcgggttagaactaaagagtgatttcgattttctagaggatagctggtctcgcaccatgcaccaactcgctttgtatcctttatctaaaaaacttacttgtctctaataatcgtttttaacgttcttcagattcagctgattctacttccttaatagacgcaagttctgtcgcatctacatcgtaagccatcatttgttgccaatcttcacttttaattaaatccatttgtgcttccactagcatacgtaaacgctcacggaatactttggattgacgttttaggtcttcaatttcaatcgcgattttgcgcgctttagaaagtgagtcgcttagaattcggtcagcatttttttctgcttcacggataataagtttggcttctttttcagcggaagctttcacttcttcggcagctgtttgtgccacgattaatgatttgtttaatgtttcttcaatgtttgtaaaatgacctaaacgttcttcactattatttaaagtgtcctcaatacgctttttctctttgataacttgttcataatctttaatgatttgatcgaggaagtcatttacttcgtcttcgtcataacctctaaaaccacgggtaaactctttgttatgtatatccagcggcgataatggcatatctagcacctccatacgactattgtttataaatacctaacatacattctaccatagttactagctttttcctagaatttatattaaaaatggttagattaaaaatcctgctttttctaaggcctcaattgcttgttctaattgctcttttgtatctgcttcaatcgtatgcaaatgcgtgccgtctgttaggcccgacagcatagtggcaccagtcgtctgtacttttttaatgaatttttcgacatcaaaccggctcttcaaatgcaaagatgcagtaatttctccgtaaatcggatggtcaactatcacatccacaacagaaactccgtgatcgactaaaatatttaattcttccaccgcttgttctttcgtgtgcttcacggcaatcacccgtcgttcccctgcaaaacttgtttctttcgcataaatatagccttgcggtgtagccataattggctcatttccggcttttagtaaagaaatatcttgaacaatgacttggcgactaacgtttgttttgctcgcaagttggtttccggaaataggcgtttctgcttcttttaaccattttaaaataagttgcctgcgtgtatttcctaatatttttttcatcttctcacctttttcgtagtaatttatctagttcctttttaaaaatcagactatcgcttaattcattttctctcccaaatgacaatcgaataaagcgacttgcttcttctatcgttttcccagtagcgagtaatgttctggacggcgctgggtcacgtaaactacatgcgctcgttgtcgaaatttgaatgtccgcttcgttaagtgcaagtaatgcttcctgcccttgcatgttcggcaaagtgatccctaaaataaacggagatgtatttaatccgccttccaccttgactttcgctgttaacgcttcgcaaatcgcctttttcaattctgcaatccgccgcgcttctttttctctatttcccattatatcataggcagctgttgtaaaggcagcaattgctggaacatttacagttcccggtctaaagccgaattcatgatgcacattcggcaaaggaacctgcataggaacatctggctttataaaaagtagtcccgctccttttggaccataaattttatgcgaggaaatactaaagctagtcacgtcatctaacgttagatctaattttccaaaagattgaacgatatctgtatgaaaatacacgcccgcttgtttagcaatatgcgctaattctctaattggctgaatgctaccaatttcagaattcacatgctgaataatgactagtccggtatctggtgaaatcatatcgctgagcacagctggatccactctaccaaatgcatcgactggtaaaagcctaagccaacatgctcctgcttcttcaagtgcttctagttgctgccaaacagaagcatgctccaatggacttacgagtacttctttcttcttggtcgaatgtagtagtgtttggattgcgatttgattgctttctgtgccaccgcttgtaaacataattccacgacttggcacatgtaaaatttccgcaaaacttccccgacatttttctaatagagccgcagatttcgttccggcatcgtgtaaactttccgaattagcgaagaattctctggatgcactcataaaaacttctaaagctgcctcgctcattttcgttgtggcagcgtgatcaaagtaaatcattttttacctctcccccaaaattttatacttgaatttcatttcgttttgtgtgattatagatgacaagacaactgtatattcacttagaagtatacaattaatcgaacctactatgcaagaggtgaaaaggatgataaaagagcgagtaattatcgttgggagcggcatttctggttgcacggctgcccttcgtttaatgcaggactatgatgtgacaataatcacaaaaggctacaaagaagaaagtaattcgatgctcgcgcaaggcggagtggcagcggcagtgtcaaaaaacgataccccgaaaaaacattttagcgatacttttcaagccggttgttttcataataaagttctagcagtaaatcaactcgttactcacggaccaatggttatccaaaaattaatcgcagaagggatggcttttgacgaacaagacggtgaacttgcgcttggtttagaaggcgcccaccaattgccacgaattttacatactggcggtgatcaaaccggcaaatttcttactacttttttacaagaaaaattaacagacattcactggcaagagcaaaaaatggctatcgaaattataaaacagaatgattcggctatcggcgtgcattgtttagataaagaaaatcgactacatacttattacggagaacatattattttagcaagcggcggacttggacaactttttccagttacgacgaatgcggcgacaatttccggtgatggtttagcactggcttaccgggctggtgctaagctaaccgacatggaatttatccaatttcatcccactttactttttctaaacgggcgttgtcatgggcttatttcagaagcggtccgcggtgaaggggccaaacttattcgcgcagatggttcggcgataatgactgatgttcacccgagagctgatcttgcgccgcgcgatattgttgctgcgacgctatttgcagaaattcaagatgggaatgaggttttccttgatatcacggcaattcctaattttgaaaaacgttttccgggaattacagctaatttggatgcacatcacatcccatttcgtgaaacaaagcggatcccagttcatcccggcgcacattttttaatgggtggtattcgtaccgacctatctggtaaaacgaacattcccggtttgtacgccattggtgaggttgcaaatgcaggagtgcacggcgctaatcgtctcgccagcaattcccttcttgaaacgctcgtctttggtgaaaaagtggctgaatacattcgcacgcaaaaaataaatccaatagaccatccagaaatccctctttcgaaccaaatccaaacgccccatttaccagataaacaattacttcaagagaaaatctgggaaacgcttggcatcacaagaaaaccagaaaaaatcaccgaatttcttcactggcttactgatttcgattacgcaaatcacactcgaaaaacagcggaaattagccacatgcttatcaccgcaaaactaatcgccgaaagcgcgctcaaacgaacagaaagtcttggtgcacatcgaattttaaaaggagtaattaaatgaattccatacttatgaatcaagcaattcaagcatttttactagaagatattggtcagtatgacttaagtgcaggaactgtttttccccgtgacacaatgggagaaggtgttttcctagcaaaagaaacaggtattctttgtggcatttccatcccgccgaaagtttatgaactgctcggtggaaatatacaatttgaagcttataaaaaagatggtgactgggttcaaaaaggcgatattatcgcggctgttaaggctccagttcgcacgttactttccggtgagcgagttattttaaatttaatgcaacgaatgagtggtatcgctagccaaactaattttgctatcaaacaactggatgattccgctattcggatttgtgacacgcggaaaacagcacccggtcttcgcgccttcgataaatacgccgtacagaccggtggcggctttaatcaccgtaatggtctatacgatggcgttatgttaaaagacaaccacatcgccttctctggaggtattacaagtgctgtatctactgtacggggaaaacttggccatatggtaaaaatcgaagtggaaacagaaactgctgaacaagtaaaagaagccgttcaagccggcgcagatatcataatgtttgataatcgcacaccggaagaaatcaagcaactcgttaagctagttccaccgcacattactacagaaatttccggtaatgtcactttagaaaatattcatcgttataagggttctggagcaaattacatttctttaggctccttaacgcattccgttcgtgcgtttgacatcagttttaatagcaaaggaggaataaaggcatgaatttactagaaacggtcgaacaagatacaatgccaactcattataagcaaatgacgcaggtcgaaatgattgctcgtgtgacggaaattaaagcccagcttggcgagaatctctttattccctgtcaccattatcaaaaagatgaggtcgttccatttgccgatgcgattggcgattctttacaattagcgcaaattgctgcacaaaataaaaaagccaaacatatcgttttttgcggtgttcattttatggcagaaacagcggatatgcttacgacaagcgagcagattgttactttgccagatatgcgcgctggttgttcgatggcagatatggcggacattcatcagctaacaaatgcttggccaaaactgcaaacccttttcggcgatacgattttacctgtcacttacattaattccactgctgcgataaaatccttcgttggcgaacatggtggtactacggtgacatctagtaacgcaacaaaaattgtctcatgggcgctcgaacaaaaagagcggattttctttcttcctgaccagcatctaggtcgaaacacggcttttgaactaggtattcccctcgaacatatggcaatttggaacccgataaaaaatgaactagaatatgaggggaatttggatgattgtaaagtcattctttggaagggctactgctctgttcaccaacatttcacagtcaaaaatatcgagaacattcgtaaaaatcatcctaatatgcggattattgttcatccagaatgcacgcatgaagttgtttctttagcagatgattccggctcgacgaaaaaaattgtaactgaaataaacaatgcagcgccaggtacagaatgggcagttggaacagaagctaatttagttggtcgcattatccaagagaatccagataaaaaaatcgtctcgctaaatccgtttatgtgcccttgtatgaccatgaatcgaattgatttaccacatttactttggacactagaagctatccaaaacggcgaaaaacgaaaccaaatcaaagtcgatgaacagacaaccaaatttgccttaaaagccttagaaagaatgcttcaattaagctaataaaaaaaacgaaagcaacaactgctttcgtttcagctctataatttataaaagcttctatttgtcaatctaaattttaatctgtagaacttactcgagtatatgctactatcatgactaaaaagcaactcttttcacaaccaattaatatccaccctagctatacattgaaaaaagtgtatttacaatgatggttttgggtatattttgggtataccctttttttacatttttgcttgcccttgatttaaataaacaaattctccttaaataaaaactaggttgcccatcttttttctcaagtgggcaacctagttttattatattttagctatttttttgctttttaagtcgaaagaataaaacaaaagatagacacacggtgatgaaaccaaatatgctatacaacacactatcccaaagattatccccagtagttggtagttttaaatttcccgctactatcggttgttcctgatgtgttgcttttatttttaaagttccggattgtttcgtgggtgtttgctgtgtacttggtgtgtttgggttagctggtgctggtacgacaggtttaatcggtgttattggtggcgctggaacaactgttgcttttacagtcaccttaatcgtaacagaatctccggcaaaactataggttaccggataaacgcctgctttcgtagtgtctaccgaaccgtctactttcacctcatcgaagggaaccgcgacaccgagtgaatctactgcactatcaaaattgtcctttgcactccatgtatctcctacattcattgtagaatcatgtgctttaatcgaagctggtatggttttgtacacatacgttactgtttgtgcattggttttgaaaacaccactcgcgttcgtcggcaatttgctttcatccaatgtgtaaccagcaaattctttcgctttcgtttggtatggatcatctacattaccagttaagttatcggaagctgttaatatttttccctcttcatttagatatttcacggtaactggtgctgcagcgacactattttttgtatatacatagatcactgtttgaggctcctctgtaaaagtcccctgggcattcgtaggtgtttgtgtcaacgtatagccatctatcgttttaggcgttgaagcataagcatctccttcattaccagaaaggatatctggtgtggctaacgtatctccattactatccaggtattgcacggtaacatccgctccttttagtggtgcggtaactttaattggaactctcacttttgcaaaaggattagagttcgtcgataaggtgcttttaatcgtgatataaccatcccccacgtctgtcgctacgccgttagtgagtatattagcagaagtcccatcatcataatacataaattcatgttgactaaaaagaggtatattagatttcaatcctagatttgttttatcaggagttaattgtttgaagtcagtatttaaaggaacctctatagttcctcctgtataagtcaattgatcttgtttttggagataatctattgttgggttatcataaaattccaacatgtttcccccactattaaaattgtccaaataattagctggaatatcagaagcaatttgattaccagcaagagacatacctaatttcccatcatgcattgctttccagttagttgttaaaatactatcgggaatagtaactaacttttgattacttacatccaaaacctttaaatgagaagctagcgtagtaatttctgtgggtatctctgtaatattacccctactgatatataagacttctaatttaggtaattggaatatcaccatgggaaactcctgtaaattattctcatctacatttaaagtgactaattcttttaaactccctacactctctggcacttctgtaatagtgccatagttagcttctaaagcagttaagttcttataatccgatattttatttgggattgaatctgcaccaaatacatgtattttttggatggtttccaaatcagctagagtaatgtcttgcctatttttggataaaatcttttcggtttcggcaataaaaggctcgttaccatctagctcctgttcaatccatgaagtggaggctgcctgtgcctctaacatttggaaaggaagtactgtcatgaacaataccaacaacaggagatatacaaatttctttttcactgtagtgccacgtccttagttttatttttatacttctaattatactctttgcctaaaaaataaaatcctaaaaacagactattaattactctacttcgtcgttattgtgtcttgtcatatattgcctgtcagcttcagatatgtccttttttcacacatcgtaaaacacttaatatacctcgctaatgactatagtttttatcataaaaacagccagaaaattaattcctggctgttttttactatatttacttttcctacataccccagtttcctgggtctcctatgttctaattaaccgtaagtacccaatcatatacgcaaccttcttgagtaatagggtatgcatcattgaattgaacgttgaaattgtatacacccggactaagttctgatgtgtcaagagtaatagattctgtatccgcattggtagtagttacaacttctaccggaatatctgctgaataactaccaagcactgtaggattaaccaacatattaatctctgccaattggaagtaaataggtagttggattgtacacgtttccccttgcttaattatttgatctggcacggtcccagattgattttcaataaaaatcgaatttaacacattggatgggagttcatttaagtgattataatctagatttaaattattcaaattggataaattggtaaagttggtcatggtattcgttaaattgttaaagcttaaatttaattcagctaagttagttaagttttgaaaatcaggaagattggttaattgattgtgacttaaatctaacgtagataacttgggtatagtatgaaaatctggcacatcatcacttgtaatcatcatgtcggccatatataactggcttaagtcaggcatgccagtgaaatccgggattgctccgattaagttgcttccgctcatggtaatggtgaccatttcaggataattttggtagtctggaagagataagtttctagttaccccttcaggtggagtattaaagaataatgtgtttagatgtggaatagtagaaatatcagggaactccgttagatcttctccaaattccataacgctaacaatattgacgttgttaaacatggcacgctctagtaattgcatggaatcattcgtaattgtttctgtttcaaatcctaagccagttaatgcatccaaatcatcttggtcaataacgtcattcacagagtctttgttcaagtttttagccatatctttggctaatccttcatctggaaagacatcaataattggagcaggtagtggatataaatcggatgcagcttttgcttttagatctccaccagttatggttaataataagacagttaacaacaatgttgtacttaaacccgttaatatttttttcaatgaattcaatcctttctttttaaagtgattaaatcataacatgtaaatccacaagtatttttttatacatcagatttgaacattaactaacttttttcaatcttacataacctatcctagtatattgataagtaagatacaaaatagacgcaaaagaagagaagacacaaaaatcatcttctcttctttttatttcaaatcattaaaggtttttcaccgaatctaactcaatgctattgagttagattggatggaaggtctttgtgcttgaattttgtattttgaaacaaaaaatatcttcttctgcaatggctaattattcatattattataaaggcctccaataaaacgctatttataatttgatattacagtctgaaacgaaagcagcagctgctttcgtttttattttaaatagccaatttcgatccgaattttatcttttttcgttctgccgccagtcgatagtacttttactcgaccatacccgcgagcagacaatacatcttcttcctcacattcaaaatctgggttttccactgttttccagtttactttcactagtcccgcagttaccaattgtttcgccttctgtctagaaatatgatgcgcattactaataatcacatcaagtcgcatactagaaacagttaagcccatctcttcccaaataaccggcgcatacacagcattagttaattccgtttcctctaacatcacatttactttaccgattttttcaagttgtaatgtcaaataatccttcattgtactttctactaataactgccattcggtaccattatttaaaatatctccaaaaatatcgcgcttcattccaagcgacattagtgttccaaggattttttgatgtgtgagggtcgtgaattttaccgggtagcgtatatgaaataaagcaatctcaaaatccgcttctgttggcgtataataatctggataaatcagtgcgcgccgtcgctccgcgtgcgccactccaccaaaaaactgtacattgatctcatcataaccgccgataacagtttcagtaataaaacgctgtctcggatccaagaaatccgtaagttgtggcgtgtattcattctcaacttgcatcgtaatccctaaaatcttatcaataaatgcgtattcttctgcgcgaaaatgctgataaattccatccatcataatttctccctttcaatccgtgccgagtctttagccctattataccatgaaaacaactgctaccaggctaatcttgcttattaataaaaaaagccacccatttaaaaacgggcgcgctttttaaaataacattggaatgacgtacacttgaattaaacctgtcaaaactctcatcgcatattggaaaatgaaataagccacaagggacgaaatatcaaacataccaatcggcggaataatccttctaaaaggctctaaaataggttcaaaaatacgtgctaaaaattggccgatttttgattctcttgcaccgggaaaccagctcatcaagaaataaataaacattagtgttggcaaccatctgataataaataaaacgatttccaccacttgatataaaatactttgcaatctagctcacacctctacttcatcacataaagttttgttcatcgagcatttcggaaatagagccatccacttccacattgtctggagtacataagaaaatattattgccaacgcgttgaatatctccacccaatgcatacactgtaccgctcaagaaatcgacaatacgtgtcgcttgatcatggctaatacgttgcaagttcacaacgacagatttatattctttcaaataatccgcaagttcttgtgcttcagcatacacacgcggttcagcaagtaccatacgactagaaaactgagctccctgcatactaaccacctttgcatcatcttcttctactgcataaaaacgatttttatttggtttttctttcttcgttttcttttgcataggttctggttccctcgctacttcctcttcataatattcctcttcttcatctaagaaaaagaatgacttaaatttattcgatagtcccatttgttacacctccatattatcgtcattcaccaaagctcttcctattcgtataaatgttgcaccttctgtaatcgcaattccgtagtcatttgtcatccccatagataactctgtacatggaatattttttaactgaagcgcatgaatttcttgctgcaattgctttaactcatgaaatacgtgatgcagctctatgtcgctatttgtaataggtgccattgtcattaagccaacaatctcaataaacgtaaaattcgcttcttgtaaaaaagatagcgcttcttctttggaaaaaccatgtttactttcctcgccagaaatatttacttgaaggaaacatttcactggtttagtagcacgcttttcgatttcctttgctagcgatgatcgatcaagcgaatgcaaataatcgatttgtggtaacacatcttttactttgcgcgtttgcaaagagccaatgtaatgccaacaaatgtcgtctttatctgcaagttcgactgttttttctaggaaaacatcggcacgattttcaccaaagtggcgaatacctaaatcataaagctccgtgattccagttacatcaatcgttttcgtaacagctaccaatgttacatcttccgactgacgattactttcttcacaggcatgctcgatttgtgcagttactttttgtaaattagcttgttttgtcattttttatcaccttatataattcccgaagtgctttatttaaaacgcttcttgttataatcagatacccggtcacttggcaatgcttcaaaagtggccgggtgaaattgtcttataagtattatccgcgacggttacggttacggataaatgctggtacatcaacatctgaactattttgttgtggttcagcttgttgttcatgaactggtgcatttgcttgttgtggtgcattttgcgcataatcattttgttgttcgtcctgtacagcataattaggacgatttacttgaatagattgatttggacggcgatttgcttgcgcttgttgttgcgcttgctttgcttcatcaaaacctgttgcaataacagttacaatcagttcatcttttaattcgtcattaataacagaaccgaaaatcatatttacatcttcatcagatgcgcttgatacgatttctgctgcttcttgtacttcataaaggcttaggttagatccgcctgtaatattcattagcacaccttttgcaccatcaacagaagtttcaagaagtggagaagagatagcttttttcgcagcttcagcagcacggttttcaccagttgcaataccgattcccataagggcagaaccgcgattagtcataattgttttcacatcggcaaagtctaagttaattaaaccaggaacggcaatcaaatcagaaatcccttgtacaccttgacgtaaaacattatctgcttcacggaaagcttcaagcatcggtgtatttttatccacaatttgaagtaaacggtcattaggaataacaattaacgtatccaccgcttctttcattgcttctgttccagttaaggcttgtttcgtacgttttggtccttcaaaaccaaatggtcgagtaacaacacctactgttaaagcgcccatttcttttgcgatttgagcgataacaggtgcagccccagttccagttccgccgcccattccagcagttacgaataccatatcagagccttttaaagcttcttcaatttgttcgcggctttcttctgcagcttttttaccaatttcaggtacagctcccgcacctaaaccacgcgttaattttgtaccgatttgtaattttgtttctgcttttgctaagttaagtgcttgagcgtctgtattaacggagataaattctactccttgaacaccatgctcaatcatacggtttacagcattgttcccgccaccgccaacaccgattactttaattgttgccaaactttctgaactagtgtcaaattctaacatattattgcctcctatttgccgatttatacgatacgattttcttgctgacctatcagctattcacttttattcaaaaaatgcgccgaaaaaattcttcattttcgttgatactttttcgtcatctgatttcttttgttttggtttaggttgtttttgttttggtgcttcgtcgtcgtaacgaggttcgtttgccgaactgcttacgtcgcgtccttctaattcagccatttgataagcatatttaattaagcctactgcggttgtaaaggaaggttcccgaacaccaatataatcaggaatcgctagtctaacatgcgctgctaaggtttttccagccaaatcaattgcccctggaatagccatcgaaccaccagttagtacataacctcctggaagatgcgttttaccgacacgagtaagttcttccactactaattggaaaatttcttccatacgcgcttcgataatatctgctacttctacttgtgtaaaatgttgtttttggtcactaccgataacatcaatagcaaaaacttcatctggagaagcatcatcataaaatgcatagccatgatccaatttaacgcgatcggcatttgcagtagaagtgtttagtccaagtgataagtctttggtgatattatctccaccaactggaatgacaccagtataagttagtcgtccttgctcaaacacactaacagttgtagttcctgcaccaacattcacgagtgctgttccaaattctttatcatcttctgacaaggaaatagatgcctccgcaagtggttgtaaagcaatatcagaaatttcaagtcctgcacgttccacacaacgtaacgtattatgtaaaattgtttttgaaccagtgattaatgtaccttccatttctagacgaacaccaatcattccacgtggatctgtaattccagttaatccatctacaacaaattgatctggaatagtgttaataatttctctttcaggagatagaggaacaacttgagcggcatccattacattccagacatcttcatctgtaatttcacggttttcgctacctactgccacaattcctcggcaagcttctaaatgcacttgactcgatactaccccaactattacttgagaaatttcaacgccaaccattctttctgcttgttcaattgcctttttaatggattctacagtcttgtctatgtcgataataatccctttttttattccggaagattcgacattcccaacaccgataatattgagtctatcgtcagccatttctgcgatgattactttcacagaagctgttccaatgtctaaacttacataaatttcgctatcacccatttatcggcacctccttttattctagtcatttaacatgtatttatttcatttttttataccgagcaaaagccggttttttaacttttttgaaaaagctatgaaatttctttattttatggcgtcagtgtagaatgattgcccattctgcctaacatacaaaatcacttatttacagtctacactaagaaagaaggtaataaaagcacaaagaacattttttggcaaattcttaagatatttttttcatttcattcaaaaagcgaacaagtgttggcataccttagcttaaggtcatcattttgttacctttttgaaacatctgttatctataaattcgccaaaaaattagcgagaagaaaaaaagtattattcatttgtttctttcttctctttagctgcttcttcggttgcttttttctccgcattctgttgataataactttggaaataagaacctacttcaatatcaataacccctttttgtcctttcgccagttgagcgacaattgctggataatgttgcattttctcagcaaaggtactaatatctgcggaaacctggttaccatcgttcatatataatttaatatggtttttatcactttttgttggactataaatcacttccgagatagaactaacaacatcttttggtaacttattaatttggtctaccattttctcaagcgttttaccgtttttaaaattttgaaatagcaaatcatttccaattgggaattgtcttggttgatctgttagcataatgccgctttctagcacatcatagtatttaccatcttgttgttgataacctatcgttttaaattcggtgatattgatttgaacatcatttaacccttctttagaaacggtagcatctttaataagggtattttttttgagggcatcttcggttttcccattacttatcccgatgacaaactcaccaatttcaagtccactttcttttcttacttcattctcagtaagttgcttattgccacttacagcaattttatctaacttactgagtggggagaggaaataaagcgtaatggcgatcaaaatcacaaaaattccgattaaaatggctaggtgtcttactaatttttttttgcggtattttttgagttctggtatgcgattttcaatggaaattactcgtttattttcagccattttattcgctcctttctgcgatttatttcataatgctaaggactgcttctactaatttcgctgctgcatctgggcgccccatttgtttagcacttagcttcatactatttaatttcgcctcgtcattcaaaatcgaatcaactgtcgccattaaatcggtattttttaattctgcttctgtaattacgatagctgcattatttttttctaaagcgcgagcgttattttcttggtggttcgctgtcacgtatggactaggtatcaaaatacttggaaccccaagcgctgtaagttctgcaagtgtagtcgctcctgctcttgaaacaactagcgttacagcgtttaaaattttcggcatatcataaataaatggttgaacactaatatgattacccaaattcaactcagctaaagaatcttttattttttcatagtgtacatcgcctgttacataaagtagctgaaaatcccgattattccattctggcaaaacagcttctacagcttcattcacgccgcgagctcctctactgcctccaaaaacaagcacagttggcttccctgaaacaagcccgtaagcttcaagcgcaccttctgagtccacacctacaacttcagaagcacgtggattaccagtgaaaacgattttttcagatgcaaaagaatcacttacttcttcaaaacaaatagctactttatctgtgtagcgacttaaaaatttattcgttaatccagcaacactattttgttcgtggattaaagtaggaattttaagttttgcggctgcataaacgactggaccacaaacataaccacctgttccgataacgacatccggtttaaaatcgcgcaaaatttgtttgcttttttttgcaccacttagaaagcgcatcactgttttaatattttctaaagataatgaacgtttaaaacctgtaatttcaatagcttcaaaaggaataccctcacgtttaacgatacccgcttctaagcctttttctgttccgatatataagaattccgcttcaggatgacttttttttaattctctgatgagggcaagcgctggataaacatgtccgccagtaccaccaccacttattgctactttcatttttccacctcttctattagctcgccgattgcgtccatatatgcattcccgcgaacttcaaatgtccggtattgatcccaactcgcacatgctggtgaaagtaagataatatctcctggcgctgattcgcgataagcaacaggaactgccgcttcgacattatccacgtaatgtacttcaatgccagcgattttcccgacacgaccaattttatctgctgtttcgccaaagacgattaacgtttttacatttttgaaaaatggtagtaattcgtcaaatgaattaccacggtccaaaccaccagcgagtaacacaactggatttttaaacccttttaatgcactttgagttgcaaggatattcgttgcttttgaatcgttatagaatttacgaccttgccattctacaacaaattgtgtccggtgctctacacctttaaatgtttctaatacgtgcatgatttcttcgtttgtaacacctaatgtctttgctactgctacggaagcaagtacgttttctaagttatgttctccaggaagtaaaatattgtcacgctccccaatcacttcgtcgttgaacataatattgccattttgcacgtagcttccttgaccaagacgttgcgttgttgaaaaaggaataacttgcgcttttgtttgttttgttaaatttttaagctcttcttgatcccagttaattactaggaaatcatccgctatttgatttttttggatgtgccattttgcttggacgtattcgctacggtctgtatggtagtctaaatgtgcctcataaatattcgtaataacggaaatatgtggtttaaacgtttctacgcccattaattggaacgaagatagttccatcgaaatatattgatcacttgttgcattttcagcaacagcggatgctggaaaaccaatgttccctgctagtaaagaactattttctttatgtgtatttaacatatggtgaataatcgttgttgtcgttgttttaccatttgttcctgtgattccaacaatcggtgcctcagaaatttggtaagctaattccacttccgtaatgactggaattttaagttttaacgctttttcaatcattgggttattgtacggaattccggggttttttataacaagctcaaatccctcatccaaaagttcaattgggtgcgaaccgcaaataactttaataccttgctcaagtaaaccttgcgcttctggattctcgctaaaaggtttttgatcattaacagttacaaatgctcccagtttatgcataattgttgccgcgctaacaccacttcttgcaagacccaagacaagtacttttttgtgatggtacatttcaatttttttcatttcctttggttcccccatttatctcaaaattggcggtcgaatttatgattttcacaaaaacgacggaaagcgccaaccagattctgtaaaaaacagctaactagagacgcttttgccgtaaaaagattacggcgcattatttaaaaaatgactacacagacagagataattgctccgactaatccgattccccagaacgttaaaacaacacgccattcggaccagccaccaagttcaaagtgatgatgaattggtgtcatacggaagattcgtttccctccagttgccttaaaataaaatacttgcaatataacagatgctgtttcaataacgaaaataattccgattaaaagtaacagccattcttgatgtactaaaatagaaattgctgcgatacttccaccgagtgcaagcgaaccggtatctcccatgaagattttcgctggatttttattaaatagtagaaatccaagcattccacccacaatcgcaaaacagaaaatcgcgacatccatttgttcttggtaaaatgcaatgacaccaaaagcagaaaaagcaatgacagaaaggccagagacaagaccgtctaaaccatctgttaaattaactgcattggagaaaccaaccaaccagaacaaaataaagataacaaagaaccaaccaagatccacttctatattcgtaaatggaatattaagcgtctcggcaaaatcattaaaatgatacacaagatagaataaaatcgaaatcaccacttggcctaaaaacttctgctttgaagtaaggcctagattacgtttttgaactactttgatatagtcatctaggaaacctaatgcgccaaataatgccagcgcgataaatagtagccacgttgccgcactaacttcaccactgatgaacgaaaagactaagaagctaataagcatagcggtaatgaaaacaacagcacccattgtcggtgttcctgatttcttttcatgcattttcgggccttcatctctaatactttggccgaattttaatttcaccaagaatggtataaatagtgggacacctatcaccgtaatgataaaagccactgcaaatgttgatactaacatgtataaagacacaataaattctccccaatctgtttgtcaaagcacttcacttcatattttatgcgagtccgagttttttttcaatagctattcgagcttctactcgatcatcgaaatcaataacctcgtcaccaaccacttgataatcttcatgaccttttccagcaatcagaataacatcccctgcttctgcttgatttactgcaaaacgaatcgcatctcggcggttttcatgaacaacgtaagcatcactttctggaacaccttgaatcatatcttcaataatcgcacgtggattttcactacgcggattatctgatgtaaaaataggatttgttgcataatctacagcgattttcgccatttgtggacgttttcctttatcacgatccccgccacaaccaacaacgacaaaaacgcgtttttctgcaaattcatcaattgtttctaatacatttagcaagccgtctggagtatgagcgtaatcaactataacaggaaactcttgtcctgcatgtacaagttcaaaacgtcctttgacacccggtatgctttccactgttttaattgctttttccatagggatatgtagcgcaaaacttgttgcaatcgcagccaatacgttataaacactaaagttcccaatcatttttatttttaatgtgaaattaccaactggtgtccctaaatcaaatgtggaaccatggctagtaattttgatattacttgcttggaagtcagcttcttgttttatcccaaaagtgataatgtgagcggctgttgctttttgcatacgcacactttccgcgtcatccgcgtttaatacagcaatttttggattacttgtatggtagctgttgcctagttgggcaaacaataagctttttgcattggcatattcttccattgtatggtgataatccaaatgatcttgagacaaattcataaacacagcgacatcatagtctgaaccgtatacgcgaccttgaacgagtgcatgcgaggagacttccatcacagctgtgcttactccgctgagtaacatgtcccggaatgtttcttgtaaagttaggctgtctggcgttgtattttttgtttctaaaatttggtcgccaattttacgatacatcgtgccaatcaaacctgtttgctcaccattttcgcgaacgatttgttccactaagtggctcacggtcgtcttaccattcgtcccagtaatcccaacgagttttaacgcttgggtcggagatccataaaagtaatcggctaacatcgccatggcacgttttgaatctcttacatatatgacaggaattgatacatccacttgtttttctgcaataattgctactgctcctagttctactgcacgagacgcaaacttgtgtccatccactacttctccgtctatacaaataaacaatgtccctggttttacttttctactatcttgggcgatatggctaatttcaattgtttcacttacctcgccagtaaaaaccgggatagcttgcattagttcatttaacttcattcttgccatctcctcaaacttattctttctgttatttttgctaaaaccaaaaagaattcttttctatcttagcaaaaacaacaaactatatctaccacgacaaaagacacagattgcatttaaagttagaagtatgccactttataaagctgacatacttctatcttcctattattaattgagcaaatcaccgataccggcattctcttggatgtcagttgcttttttatttttttccgctgtatcttgatcgtgattttgattaaatgcacttatttcttctggtggcgcgagggttattttcattttcgtttcactattaataacgctacccgcagatacgctttggctcttcacgtaaccatttccactaaactcaaatggaataccagttatttcagaaacttttaacgcatcgtctttcgaccaagttaccatgtcaggggcagtcatgtcaccatctgtcattaaaataactttttgaccttgcatgatttcggcgttcgcttgtggaagttgttggacaatttttttgccattaccaactacaattggttccaaccctttatccttcactatttttttagcttcatctactttttttcctgctaggactggtactttttcagaagctagtttttctgcatcgcctggtttgatgttcatatattgcagactatttttcattacaggattaaaaacttccgagactgcttctccgccagtctgactgccggacaattgcggttgttgcattgtcacatagataactaattccggattatccgccggtgccattcctaagaaagagaatatataattatctgctccagtcatatacttacctgttttgggatctggaatttgtgatgtaccggttttaccagctacatcgtatccaggaatcgcgtataatttaccagtaccatgttcgccgctaataacgttttttaattcatcacgcgtcttcttcgctgtttctgcactaattggttttccagcaatttttgttttagtgtcggtttcttcgcctgtgtttggatctttgacacttgaaacaacatatggttctttcatcgtgccgtcacttgcgatagccgaagcagcttgaatcatttgcatcattgaaacggttgtcccttgtccgaaaacggttgttactttctcaattggatagttatacaaaattttcccgcttgtttcattaggtaaagcaatacctgttttcttaccaaaaccaaatttgtctaaatatgttttaaaagtatcggttcccattttgtttaagagtttggcaaatgcaacgttactagagcgttctactccttcacgatacgtaatagagccccaaccgtttccgttgttatggtcatggattgcgatatctcctactttataagaacccgattgataatattcattggcattataagcgttcgtatcaattgcagatgcaagagaaataattttcattactgatcctggctcataagcatactcaacaggtaaatcttgccaaatgctggagctgtttccggtaatagtagatcgatcagcagggttgaaggaaggacgttgactaatagctaaaatttcacctgttttcggatcagctacaactgccatcatgtttttcggtttatactttgcatcaacagttgtcatcgtatcttctaaaaaggtttgaatttttttatctagtgttagcgtaatatctttgccgtcttttgcttccgttactttgtttttagaattaggcaaaatataacccattctgtctgtactgtaatcaattttgccatttttgcctgtcaaaatatcattataacgggattcaatacccattttaccttctagaacggtagcattcttttcttcttcttgttgcgcaaaaccaattaattgtgttgcaaatgttccattaggatagaaacgttctgattgacgagtaaattcaatacctggtaaattttccttgtcaattttcgctttcgtttctgtagaaatgttttttccagcagcgccgaattcgacttggtattttcctttttcgtggagcttatctagaatgtcagattcatccataggaatatacttggcaaggattcgagctgttttttcttcatcaacaacacgcattggattcttcgttgttttggaaagtttatcgctaactactgctgcaaccgtgtaagaagccgtatcctccgctagcacttctcctttacgatctaaaatggagccacgctttgcttcgagaacactgcttttcaaatgttgtttagatgcttttgctgcaagaggtaccccatttgcttctcccgtaatttgcaaataaagaaaacggccagaaaccaagagaaagagaattgtgaaaaagataaaaagcacaagagctccccttctcatgttacctatacgccgtttcattgaccatctaccactttcacattatcgccatcaagttttagccctttttctttagcgattttcaaaatacgttcatatctccctaaatcttttacttctacttttaagtcttcatttgatttttgttgttcgagaattttggtttcttttgtttgaatttcttggttcactgtgtaaatttgcgcttgtacgctaattatacgaaaagcaacaactaaaacaatcgcaagcgcaatcgtgatgattactttttctccaagtgtcatttgaccacgttttaggatttgttttttgggttgttccgcttctctatgtactctatttggctcgagattcgatttataggcgacattgctcacattttttcaactcctgctatttgataattttttcgatcacgcgtaattttgcagaacgtgctcggttgttttgctccagttcttcttcacttggtacgattggttttcttgtcgcaagtttgaaatctggtttatattcatctggaatgacaggaagacctggtggtaaatctggtccttttgtcgcttcttggaataattgcttggttatgcggtcttctaaagaatgaaacgtaatcacgctaattctgccgcctggttttattaaagttaaggctttttcaagcgaatcttctactgcgccgagttcgtcattaacagcaattcggatggcttgaaaagtgcgttttcctggatgtccaccttttcttcttgctggcgctggaatagctgttttaataatatctactagttcgccagtagtttcaattggtttcacttcgcgacgacgttcgatttcacgagcaatttgtttcgaaaatttttcttcgccatattggaaaaagatacgaattaaatcttggtaagaccattcattgacaactgtttttgctgtcaattcttgttcttgatccattcgcatatccagtgcagcatcttggtgataactaaaaccacgttctctctcgtctagttgaggggaagaaacgcctagatcatacaaaatcccatcaaccgcttctataccacgctcatttaatgcttctttcatatcgcgaaaattggctttaataaaagtcactttatcgctataatctgctagtttaatttttgcattatcaatcgctgtttgatcttggtcaaatgcaaataaatgccctttttcattaagcttatttagtaaatactcggagtgacctgcgccgccaagtgttgcatcgacatagattccgtctggttttacttcaagcatatcgactgtttcatgtagtagtacggtttcgtgcttaaacatgcatttccccccttaaatatcaaagccaatcatattttcggctaaatcagcaaaagattcttctgcctcattaaagacatcatcccactctgatttactccaaatttcaatacgacttgaaactccaataattactgtttctttttccaaatccgcatactgtagtaagttggatggaatattaatccgaccttgtttgtctagttcacattcagacgcaccggaaaagaagaaacgtgtaaaggaacgagcatctttcttagtaagtggtaaggtttggagcttttcttcaagctttttccattcctcttgtggataagcaaataaacacttatcaagtcctcgggttataacaaaattatcccccaaaagctcacggaatttagctggcacaattaatctgccctttatatcgatgttgtgttgatattctcccatgaacattagacttcacccactttcatacataccactttaccacatctccccacttcgcaccaccgaaaacctaaaaaagtgcaaaaaaaaatcattccagccaaagcatagaatgattaaacccttatttaaagccattttttcctaattcaattctaaaaaaacaatgtggggcttggtggagggattccccactttgaaccaaaattcattttactaacactttttcccaaccagattttaatgccaccgctgagaacactatacttaaaataccaagaataatcgtgaaagctcccatgccatatttgccaataaatggtgcaaatactaaacttacagaaccaatcattttaccaatttggaaaataataccattaaacgccatgtaggccccacgcttgtcatcatcaacaattgccgctaaaatagtttggcgtgttggtacataaagtaattcaccaatcgaaagcaccatcgttgccaaaagtaaaacagctagattatttgcgaaggcgcaaactgcaaacccaagtgcaaacaaagtaaaccctacatacataataggttgctgcgcccttttagtcacaaatctcgcaattggtacggtaaaaagtacaataaataaagtattcacagcggttaacacactcactatttgtactccattgagcgaaatatttccaagtggccccaaatgcacaagtaacgctttcacatcttctgctaaacgaaccgaaatgtagttgctccgttgaaactcaatcgacatgatagcaattccaccaatagtatatagaagaaaacgataatcatgtaatacttgtccataatttttaagcattcccattagtccatatgaccctttgtgcggcatttctttttgctgcaacgtctcggaaattaagcttatagtaagccacgccgtaacaaatgacatgataaaaaggacaactaatagcggaaacagataatctacaaaaaaccacccccccaccataattccaatcatgatcgataaattattcgcccaataactaacggaatacataaatgaacggttctctagggtacttacatcaatcaacatcgcttctccagctggattaatcaacccctgagctaccccaataataagtaacattacaaaagttatccacggagaatgaaacatgggagaattgcatagcaccatcccaagaaacgcaaacactttaagcagttctccggtgaccattaatttcttacgtccaataatatccgctagatgtccaccgtacatgccagcaagaaattgcgctaatacattaatcatcaagagaaagccagcgacactactattaatctccattgaaaaataaattgccataaaaggaaaaatcattgaaccaattactttactcaaaaactgaattaatatccgtgcgcgaatattcgggtgtaactctctaaacatgacattccctccatttgcaatttttctgacttctctgctagtataaaagggatacataaatataaaaagggtattcattttcatatattgtccccttttagaacggagctgtgctatggataaagattatttcactatgcgcgcgcatttatacaatataactaccgatttagaagtgcctttcaaattaaatgatgtggcaaatatttggttttgtacgactaaaaatgccaagcgtaaattgcaacaatatcaggcgaaaaaaatgcttacttatcttcctggattaggccgtggaaatgtttcacggattattttccctaaacagttagaactagaggttcttgacgttttggaacaaagtttggctgaagatgcatttagcaatattttatttttgctacaattgcctatccctaaaagctggttcacaagtatttctaccgaaattcaacaaatgttcggtttgcaagtaacagagaatcaacaagaagttctgcgctctatcgttcgtcgcaagctcactaccttagatccacttcaaacttctgtatccatggaagcttttctcatcacccaaattagtgactctctcgtcaaatatgatgaaaagaaaaagagaattatacctcatatagcacaccactggaaagtttctgatgattttacggaatggacattttatttacgaaaaagtgttttatttcatcatggacgcacgcttgatagtgaggatgtaaagtacaccttgatgcgttctatgcaagcagaatcggtttctttctggcaattacaggatattcaatccatctactgtcctaataaattcacgctctccattcagttaaaaaaaactgacccttttttcattcgttatttatgcacagcgaatatggctattttaccgcgtgatattatttttgatgaatataaatggatttctactggtccctttcgagttgcagagcggaatgacgagcgcttgatcttagaagcctttgatggatattttctcgagagaccgattcttgatcgagtagaattttggaccgtccaaactggaaacaatttaaaaaccattccaatgcagttcacttccgttgattacgaggaaaatcccgcctatgtggaacgtcgtaaacctggtgttggcgttaattttatttgtttcaatacgcaccgaaatggcaccccgcaacatccggcatttcgagaggcaatctaccatctcatcgattgtcaaaaagcaagtgatcaacatttcgaaaactatggtacagtcgcatctaactattaccctgaaaaatcccttccacctaaaaaacatcctgagaaaatcactactttattaaaaacagcaaactaccaaggtgaaaaagttgtttttggaactacccaacaccctaccgctgtaaaagagtcaaaatggatccaagagcaagctgtcaaattcggaattaacctagaaagaaaaatcatttcgcatcaggaagcttcctattccaatgttccagcagaagaaaccgacttcatgatgatgggagaaatcccagcatcagatgacgaaatggcctatttagattttttaaataacccctatctgttgccgcaacaacttttcaatcaagtaattatcaaagaacttacggaaaaactggttgcatttaaaaaagagaaagacgcctccaaaagagacgccttacaaacgagtattgatagctggctaacagaaaatcattatttaatttacttgcatcatccggaaaaaagccaatcgcttcattcaatgataaaaggaattgcagaaaatccttatggttattttgatttaagcaaagtgtggattgaaacaagcccgcttaaaacattaaaaccagactataaacaatcccatagaggtaaagcgccacatacaataaagcaaaaatgaagaagcacaggcgccagtatccacgaaggatttttcggaattgaatctcgccttctttctttgcagccgtaacaacaattacaatacctaaaataaataaaaataataaaatatataataagaacgagcgattaaatagcacaatcatgaaaaaatgaacagcaataatcaagaaaatagtagataagtcagcggctaacataattctccgctggcttttcttcagtttgaaactggaaaaaaacatcgtcaaaataaataccacaactggtaaaataataattattgctgttgaattagttaaccaatcaaacatcactttctccttccaaccctttaattagatgatataacgcatgaagcgtaggaagtgactcccctttttctaaaattggcagcacgattccatcaatttctgtcattcgattattcattcggtcaagagccatcgaagaaaaattagtagctgtcacttggcagattacttccactttttctaaagcattttctactggcaaaaccgtttgtatttcttttacaatcgtctttaataattcgtgccattctttattttcaagaagctttccattttggacttgaagaacagctgtgagtggattaattactgcattaataaataatttttcatttataatgtctaagtaactagcatgcttttcaactggaaaatctggatttgaatctaatatttttattacagcctcatttaactcgccttggtaaatactatactttgttcggccatgaccacgccaaatgactgttgtatcatcttcccgccccgccccgtgttcgctaatacctagtaaaatagttcgtttattaccgagtagcggcatgctatctaaatgcgccgctccgttttggatgaataataacggcactcgttcaggtatcgaccgtaacagtggcaaaatggtttttagtgagtattgtttaactgcgataattaataattcttgttctgataacttttcagcatctgttattactgtggcttgtatatgtatattttttaattcggaattatcttttaaagaaagtcctttttgatttaataaatcgctttgttcttttctccgcgtaaaaagagtaagttcagatatattggcaaaatttgctgcgtataaaagccccatcgctcctgctccaataattcctacttttagttggttcgccatttagttcagctccatattggttaatgcttttattttatcagaagtagcattcttttgcacttctgtacgcaaacaaaaacctcgaaagacccatggcgtctttcgaggttcgtcttcaacaggtgaaacgtcacctatttttagcaatattagctgtttgctacatctttgccatcatattgtccacattctgggcatacgtgatgggaaagtctgtattcgccgcaattcgagcattcgttcatgcccggaagttgaagtttaacgtgtgtacgacgcttacgctttttggcttttgaagttcttctaaaaggtactgccatttccttacacctccttgacgataactaagtacttgtatcgttaatctaagaaaaataaattccttaatatattccagcttcacggggagtttagtcttcttttttctcatcgaaaaaattggctaatcccgcaagacgaggatccacttttggttcttttgctatttgttctagtagattgccttcttctgttttcatttcccattctttgcctcgtggaaggttactcatttcgagtgcgtcttcactgaaaacttgcatcggaatttcaacaagtaaaagttcttctactacaggggttaaatcgaccatatcctgttccatcacatgccaagattcatctagaacttgttctttggatttcacaaaggtttccgtcgcatgcacttcataaggataaataacatcctcaagcgtacgagcacatggaagtgtccactcgcctctcatagtcaggttagcggtaacttcttctgggtgtacaataagttccccagttatttgtacggggcttgcatcacgaacgtctatattgttctcttgaaagaacttttttaggtcagctttttcattaatcgtgaagttgctgtcacgatattttttcaattgactgatagaccatttcatcctacatcactccaagcgcaacacaaaatattatagcttttttaaaggcttttgtcaatggtttttcggggaccaaaactaccggttgaattttatgctaaaatagattatctaaaggagggaaccgaaatgaaagcaactggaattgtggtggaatataacccttttcataatgggcacaaactacatttaaataaagcgcgcgagttaactcaagcagatgtggtgattgcggtaatgagtggctcgtttgtacagcgcggcgaaccagcaattattccaaaatgggaacgtgcgaagatggcgctctcggctggtgttgacatggttgttgaactccctgtctcgttcgcgacacaacatgcgacgatttttgcagaagaagcagttcgtattttagatgccattcatatagatacgctgttttttggcagtgaacatggagttgcggaagattttacatttgctgcgaaaaaagtagtcgaaaacgaagcccgttttgatgaagcgattcagctggcattagtcgataagaaaacttcttatgctagagcttatacagaagcttttaaaaagttgttcggccagaacttgctggatatcacgaaacctaataacattctcggtttccactacgcccttgccgtccagaaacaaaacccgtccatttcccttcaaaccattcctcgtgaacatgcaggataccatgacgaggaagcgagccatgaccaaatcgcaagtgcgaccgcgattcgaaaattaatacttgctgggaagttagaagaagctagccactatctccctgcttcttctatagatattttacgcaattatgaggggccatttttatcgtggacagattattggtcattcctgcaataccggttaattcaagccagcacagaagaactggaaggaattcgcggcgttagtgaaggaattcaaaaccggatgcagcaagcagcgactaaagcgcaaaacttctctgattttatagaattaaccaaaacaaagcgatacagtaatgcacgattacaacgaactgctttacaaattttattgaatgcaaagagcaaagctagctccccttacatccgaatacttggcatgaataaaacggggcaaaaatatttgtcgcttcataagaagaatatttctcttcctattgttacgactgtttccaaagcaccacctgggcttttagaggaagaattacgtgcaacgaacatttatacgctcgtaaaaaaattagaaaattatcaagctggcgactttcatattccaccaattttaaccttgtaatctttacaaggtttttggttgacttttatggagctattttgctaagatgtttgtccgactcaaaaaacaggaggtatgtgtatggtacaagaatatattcgattaagaggagcgcgtgaaaacaatctccaaaatatttcgctagatatccccaaacgaaaaatcactatttttactggtgtatctggttccggtaaatcttctattgtatttgaaactattgccacggaatcgcaaagacagttaaacgaaacatacagcgcctatcttcgtaatttccttccgaagtatacgcagccggacgcagattcaattgaaaacctctccacctctgttattattgatcaaaaacgacttggcggtaattcccgctccacccttggtaccattacggatattaattcgattttgcgattacttttctcgcgtgtcggcaagcctagtatcgggacagcaaatttattttcttttaacgaccctgctggtatgtgtcctgattgtcacggtgttggtcaaaaagtttcggttgatttagtcaaattacttgatccaaataaatcgctcaaagaaggcgccatcttatttccgacgttttcggtagattcatggtactggaattcctatgcttattccggcttttttgatgtgaataaaaaaataaaagattatactgacgaagaatacgatatgttgttacatgggaaagatattaaagttttcctagaaacacccatgggaagcatgaacgctacatatgaagggctgattccaaaattcaatcgtttgtatattcaaaaagaaggcgaaatgtctgcctctactaaaaaacgcgtggataaattcacccatattgcgccttgtacaacatgtgaaggcacgagactttccgcacaagcattatcttgtaaaataaatggcgcaaatatcgccgacttcacagcgatgcaattagatgaattaaaagatacgattgcgcgtattgatgaccctatcgctactccaatggtcaaaagtgtcacagagcgattgcaacatttgattgatattggtcttggttatatgacacttgaccgccaaactgcttctctttctggtggtgaatcgcaacgtgtcaagatgattcgtcatttgaatagtagcttgactgatctgctttacattttcgatgaaccgagtattggtcttcatccacgggatgttcatcgcctaaatgaattacttgtaaaattgcgagacaaaggcaatacgattctcgttgtggaacatgacccagatgtgatcaaaattgccgaccatgttgtcgatgtcggtccgcacgcagggaaacatggcggtgagattcagttcgtcggaagttacacagatttgctgaaatcggacacattgactggtcagttcctcaatcgccatttaccgatcaatagcaaaccacgacaaccaaaaggctttttaacaacagaaaaaagtagtcgtttcaatttaaaaaacattcaagccaacattccaaaagaagtccttaccgtgataactggcgtggctggttcaggtaagagcaccttgattcattctgtttttctaaaagaatatccagacgcaatagtgattgaccaatcagccgcacatgccaatatccgctccaatcccgccacctataccggcataatggacccaattcgaaaagcatttggaaaagaaaatgatgttagtccatcgctctttagttacaattccaaaggcgcttgcgaaaactgtaaaggacttggtttcacgacaatggatttggcttttatggattcgattcgtacaccttgcgaagtctgccatggcaagcgattccaggattctgttttgcaatataaactgaatggtaaatccattagtgatgtgttagagctaactgtctcagaagcactcgatttctttacggacaaaaaaatcttgaagaaaattgaggcaatggaagaagtaggaattggttatgtcacgcttggccaagcacttagcaccttatcaggcggggaatgccaacgtttaaaactcgccaatgagcttcataaaaaagggtcgatttatatcatggatgaacctacaactggtctacatatgtcagacatcgaacatattttgacgatcattcacacacttgtaaataaaggaaatacggttattgtgatagaacataatgtcgatattattcgaaatgctgactggattattgaccttggtcctgaaggcggaagtgctggtggacaaattatttttgaaggtgccccacttgatttacttgaaaaccaacaatcattgactgcgaaatatctctaaactaaaaagccgttttgtctatagcagacaaaacggctttttttattgtagtttttttaaataatccacagcatcttggaaagttttaactggaacgattttcatgttggtgtcaatgtctttcgctgttttgactgctgtatcgtaattactttcgatacttggatcgctttttttcatttcttcagtgattggatcatttggagcaaagaaaatcttcgcgccacttttatctgctgcaacaaccttttgatcaattccgccgattctacccacggttccatccggatcaatcgtaccagttccggcgatttttttgccatctgtaagatcatttttttggaaacgactgtaaatttctaaactaaacattaaaccagcagaaggtccgccgattttttcagagtcgattttcacggttggatctgcggtgattttttcatcatccacaagcgtgataccgattcctggagtaccttttttgtcaattgctgttaatttgatatcggcttgttcatttttgtcgccatgtttatagttgattttgactgtgtctcccacttttttactgtggatataatcaataaattcttggcttgatttaaacgcattcccatcaatttctgtgattaggtcgccagcgtgaaggacatcggctgctggaacatcatcttttacgcttaatacgtatacgccatcataagtgactttgacttcttgtccggctgctttataagccacttgaatggcattatttttggattcgttcatcatttgcatttggcgaacattgtattcttcgtcgctttcattctcgtatttgatctcgctatctttttctagctcatggtatggcaaaaatttagcggtcatatatgtataaatatttgcttttcccattgcaatcgtcactagactgagcgaaccgtcttttttatttggatggttatcaaccgtaacgagtggtgcaagttcttcggtcccaccaggttttgaaatataatacggaactggaataaaaaagcccgctataataataattaacagcactatcgccgttatttttttccactctttacgcattttttgtccatctcctacttacttgaattttgcttgtactgctttgttcacgatttctggcacaagttcgctgatatcgccttgatactgcgccacttcttttaccatactggaacttaaaaaagaatatttcgtattagtcatgacaaaaaaagtttcgatatccgcatttagcgttcggttcatcgaagcaatttgcatctcgtattcaaaatcactcaccgctcgaagtcccctgacaattgccgtagccccgcgcgtagcagcataatcaacagtcaatccactcgcactttccacttgtacatttggcaaatgagcggttacttgtctaatcatttccattcgctcctctatcgtgaaaagtggttttttggatgaattgtttaaaacagaaacatataacacatcaaaaatcttcgctgcacgttcaataatatctaagtgaccattcgtaatcggatcaaatgtcccgggaataacggcaattttgtcacccatttctacgcctcctgaaattcaaatatagataaaacagtaattccataagaaactgatttgattttctcgaatttaccgattgtatctggcatgattgcttctttgtcatgctcgcaaataattcttccattttcgttaactaattctaatttttctaaagttcctattaatttttctaattgttgctttttatatggtggatctaagaagataaggtcgaatttccactcatttttatggagtaatttgagtgctcgttcggcatcatttctatatacttccgcgcgctctgtaaaatggcatccttctaagttttgtcggattgttttaattgcgagcgctgcttggtcaataaaaacagctcgttctgctcctctgctcaacgcttcgattccaagcccaccactgccagcaaataaatcaagcaccatatccccgtcaaaaaagggaccgataatcgaaaataaggattcttttactttatctgtagttggtctcgtattgtttcctggaacagcttttaaagcgtgtccttttcgttctcctgcaatgactctcatgtttttgcacaacctttacttcaatgtcttttttactttatcacaaatagaagcaaaaaaacagcaagactagttgaaatagtcttgccgttttggttagatactgatttgcacatcttcgtttttgtgttcgtacatcatttcttttttggattcgtattctgtttttaagaacggacggaaagacatttccacgcgtttcacataatgaaaacgagaaactttgttagagatatcttctacttcggccatatcacaatataacaccgcatattttaacttacgcgatacataatgcacgtttccaaatcgcttcaaagatctaacttgtttgagatgattcatccaaacgacgatagcttgtctatcattttccattgtttaagccccttctttttaggataagctttacgctgaacaaccgcagcctcccccgctgccacatccacctgtagaacaagcagattttgtttcaaaaaacggattaccagttggtactttgatattctctgaaactgcacttgcgagaagcagactgatttcatccaagagagattgtaaatccatctctgcacggcgaaaagctgccacattttggtccatgtcaacttcgcgtttataggcacgagtctttctggttacttctttatagtcaggatgataccggccgaaccgctgtacttcctcgtattgttcttttattcgtatgaattgacgaatatttttttgtgaagtagcgtcatttagcaacgcttctttagcaagtttgtaattttgcgcttcctcggagtttagaatcatgctagcaagctcatctgataaatcgagtagcgccatattttccattgtagcgagcaatctagccacctccatataacttacttttttattataccatagaactattatttaataataaaattttgcgtatagtattttcgatatgttcctgcacccatatacgtatatgaaccatctagtagattttctctatgccctttagagttgagccaaccttccactgccgctgcgctatcgacatagttataggcgatattttcaccagctttagtatatttgacgtcccctttactaagtcgtttgcttagatctccttgcgtgggtgaagtgtggtcaaaataatcatttttcttcatatcaacactgtgtccatatgcaactcgcgcaacagattcatcccaagccacttcttctattccgtatcgatcacgaataacattagtgatttctagtacttgtttactagaagcatcatcaatcgcattccaatctgctggcgacaacttttcttcataaatttcaccttggtaagataattcatacggacgcattttgacgaaggataatttattgaggtaacgaacactaatcagttttgatttaaatttatcgaaatttagttgcgcataaacgccacttccaatattaacgattggacgggcatttaagtcttcttcagaaagttcgaatttataatagctgtctttgtaattaaaggatatttccgattgtaagttggcatcggtaaatactttctcagtggacatcccaattgtatatggcatgacatttaagtcttgtcctagcgcataaatggtttgcacgatattttttgctacgccgacttgcatgtagcttgttcctggttgactgtaaatgtaattatcgtaaccgtacgctgttttgtctacacgcaccgggtcaccaaactctttctttaattcgcttacgtttttattaataaatcttgccaagctggaactatcttgcacttgtttcggattttcattcgttgtttttttattatcaggaaaattagattttgtcgctgtatcttcggctgtatttttctctactgatttactaaaaaaaagatctgtgttgtatccaatgaacaggcaaatgattaatagcacagctactcgcattataaacttcacattttgccctcctcggcattattttgttttcttgatgtaacattcattttaccaatactattatcatttgaaaagctttaaaaatcataaaaaaacaattataaggaaacgcgtattgcacgcttcttcataattgttttttctttttataggaaaatcgaaataactaccattgctacgaataaaattgtcatgtagtttaatgagtatacgaacatccatttagcccatttgatactatcttccatcttaaagccgtaaatactaagtgctaaccacccgatattaagtaatgttgctaaaataacatatacaatacctaaatcaaacataaagaatggcaggatagttaataaaatcacccagaaaaacatgcttttctttgtgcgttcaatgccttttactactggcaacattggaattccagcagcggcgtattcctctttccgtttaatcgcgatggcataaaaatgaggtggttgccaacaaaacatcacgagaaacagcataattggcacaatactaaatgttggttcgactgcaaaccaaccaattaatggcggtacagcacctgaaaaactaccaattactgtgttactaactagttttctttttgcataaagcgaataaacgactacatacaaaaagaccccaataacgccaagaactcctgcttgccaagttgtcataaataacataattgtaccgacaacacctagcacaagcgcgaccattagcgctcgcttaccagaaattttcccggtcattgttggtctgttttttgttctttccataattccgtcaatatcacggtcgatgacattgttaaaagcgcccgaagcagcgacaataagtgctgaaccgacgatagtaaaaaatatcacgtctacattttgaataaaagaaattccatttaactgaaaggctaaccacattcctgtaaaagcagtaatcgtattggaattcacgataccaattttcacaagctcggtaaaatcacggacagtaaatctactcgccgataactccccagtcttttctatctgattcactttttctccccctaacacttgctgatataaaccagtgattgcgaactgatagatatcctatacccttattatgtgaaaaatacgcaccttttgtcaataaatcggctttagtcttgtacgctttacttcttcaaataaacacgctacaattagtttgatgtgtactcatgaacttatacatataaacaaattatagtaaaaatctcacacgcatctaaaggagagattggtagataatgaaaaaattcttgaaagtttggtctgtactaacgattatttgtatgacggtcgttgtgtttggcggagcgctcgtaacgaaaactggttcagctgatggttgtggtaatagttggcccctttgtaatggacagctagttcgtttaacagatgttactccggaaaaattaattgaattcatgcaccgaatgacgacgggaatcagttcgatttttgttattgttttagcgatttgtgcttggatttatatgaaaaaccgtcgcgaaacaaaaccacttgcaattattgctgttctgtttctaattattcaagcgttaatgggaatggcggctgttgtttggggacaaaatccgtacatcatggcgctgcactttgggatttcgatcatttgttatgcttcgattgtattgcttgccttgatgatttttgaggtagaccgaaaattcgatgctagaaacctcgtgatggggacgaaattacgcgttaatatttatgcgctcacgatttacacgtacttagctgtttatactggcgcacttgtacgacatgaaaaagcaagtatggctgttccggtttggccttttgaaaatgggcactttataatgcctacttctgtacaagattatgtgcagtacttccaccggttagccgcatttattttaattgtttggttattatatgttacttggcttgtgttcagagattatagaagatatcgcgtacttacttttagcatggtgttgtcacttgtgtttattgctcttcaagccgttactggggcgctttctgtttatacaggagtgaacttgtatatcgcgcttgcccatagcttaatcattacgatgttgttcgcactactttgctacttatgcttactggcatcgagaagtaaaagtaatcgactacgaattaaataacgaacacggctggcaactttttgttgtcagcttttttatttgtttacagcttttgtgcggttttgtgctaaaataagtgagagtataagtcaaacgaggtggataaattggataaaacaaagagaaaaatgatttatgagacttttatgcttattctcatattactttcccttgccctattaccgtacagaaacaactttacatttattttaaattggattatttgggtgatttttacgcttgattatctggttcgactttaccgggctgataataaatggcattatgtaaaaacgcatccgtttcaactcattgcgattattccattttatggtggatttagagcggctcggattgttagttttgttcatcttttaagtattaccgcgatgggaagacgctatattgtaccgatttatagctttttccgttctaatggtttaaatcgatttttaatgatttttgttttacttgtgattataattcctgttccgatggtatttatcgaacccgaaataaacaattatcctgatgcgctttggtgggcgattgtgactgcgacaacagttgggtacggggatattgttcctgtcacgccaattggacggattttggcatcgattatgatgctgttcgggatagcatttatcgggatgattactagtacgataacaaactttttccgcgccaaaaagcctactaattctagtacgcaaagagcgaataagattacccaattaatttcagaaacaccagacttaaccaaagaagaaattgctgtagtagagcaatttttgacactaaggaaaaaagaattagctgatgaaaacacaaaaagtgatagcgaatgatgctatcacttttttatttgtttttcgacttggtcacggtaacgttcggataaggcttcgactgccaaaatccgctccaagtcttcttttgttccttttttatgcaatactttttcatgacaaaaggctactgttacgccgtgtgattcttggtgaatttgtttgatttcatccgttgcatgtataatgccaggagtaatcgttcggcacagatatccagtaagtccggttttgtggattgctttatagagattggggattccattgaacttttcaattgtactacatggatttcgagcttccgttatttggataacggtttcgccaatctgaaatttatcaccaatttgaacagagctttccaacatattcgtagtgatgagattttcaccaaaagcagttacttgtagctcttcgccaaacatttctgtccatttcgcgtaatgttcgtatggataaatacaaaccgtacgatccggcccaccgtgatatttcaaattatgcggtgcgtcattttcaaaaccggtagtggttagataggcagattgtacaagctttttttcgatccccgtcatcatccgtttgttatttgaaaggttaagttctttcggcttgccaactgctaaatgcatgattttccgttccatctgcttactcctttgaagttatttttttcggcttaaaatagcaagaatacccgtgataagcgcaataacgctgatagctactgcggtccataataaaatcgtattatcaccactgctgcttgtatcccctgctgtgttctctgctcctgccactacctctccgtgcgagccagttgctgatttagaagactctttgacgatttttgttgtagcatgtggtgtttcagaatcttctgccccaacccattcgacgatggaaccatcttcataatattgataggcattccaagggacttctccttcttcacttggatttttagcaataaaactaaatcgctgaaattgacctttttcaattccgctgccttctgtttgccatgttactgttccgttcttcttatctatcgtcgttgtccagcctggaactggttcatacgattcgaacgatacaccctttgtcacttttaaaacgatttttttagatgctgcatctttttctgatggaactttcatcgtgtaggtttcccaggagtctacggtcgattcgcttggtaatactgagacatgcgcgctcgcttgaaatggaatgataaagacagctaataatacgacgatggagctcataatttttttcattgttttctcctttactgtgtaatattggtcgtaaatgtttgatttatatcggtaaaatcttttgttaaaccatggaccgtgatttcccacttgccggtttgattaaaatatagcccctctgcaaaatattgcgtatcatttgcaagtttggcttggaaagttgatttttcatctgttttagtagattttgttgtaatcgtcacttgttcaaaatctgttttagcagaaccatctgctgaagtaaaagtgatgataaactggttttgtccaacggttgctggttccactcgcaaattaatttttgctttttcgccttccgctgcaattgtttcgtcaaatgctttcggagcagacggtggcggtgtttgtacattggttaaaacacttgcaacgacaaggataatggttccaatgataagctcaattaaaatggttttgaatggcaattgttgatttttaagtttgatataaatgtaatgtcctagccctaatagtgccattagtataaataagccgattttgaaaagaagaattttgccgtagttggttgtaaataaattggccatttgcccgatgttcatgactgccattaataagccgctgactaatatcgaagcgaccgcaatgattgctacgatggcaaagcgaatccatactttgcgcgcttttccggttcgcggtaatacgaataagagtactaaaattccgccaacccaaacgcttgccgcaatcatatggagcatatcagcggtgatacttactattttatcggcacttgctgcggcgtgtccattctgagcctttgcaaaaatcaaatatccgattaatgcactctcggtcagaagcgcgaaccagccccattgtttctttttaaagaacatcatgacggtaaaaatggcaagtagaagccatacgacaaattcactgatccaaatataacctgttttcgtagtcaagaaagcagctaacttactaggtccaaaactttcactgatggagacgcctgttgtgatacttgtttgtacgaaaagttgtattaagagagccacacctaaaagggcgagcgctatccaagttacttttttcaaatgtccagaaattttttctgatatctgttcttttcgtggataaagtcctaacccaaaaacaagcacaccgataaacaacgaaaaacctatgtataaaatggctttttgaatcgaactaatttgcaagtccgctccacttgagggaacttccgatgcttggaacgtcgctttcgtatcgcctaacttaaaagaaatgatccccgtaaccgcatgtccatccgctgacacaacacgccatgaaacagaatagacatctgctttcaaatcagctggtaaagacgcttcaaccatatgattattctttttagaaacagaggttttgccggtttccacttgcttcccacttgaatctttgacttctattaaagggaaatccgcttcaatttcttcattaaaaacaagcgttactttttcgggcgcggtttgaatatgtgattgatcggccggattcgaattttccaaataagcatgcgctgaaacatgctgaactggcacgattagtagatatagtataatgagaaaaaaactgacccttttcaataatttcatttgctactcctttttcgaacgaacggttttactctttttaacttatcatgtgcaacaattgaatggaaataatcggctcatttcctattgcaaatgatgctaagattatggcatagtgatagaaaaggaggttttatctatgcttcgttatatcgaattgtttttcatgtttgcctttgttacgctcatcacgatgtggattcaagcactcttggcaaaatggcaacctactattcttcgttctttctggcttcgaacactcacatttattattattggctacgcattaatggcgccaacgctatacataggcagtttattgctaaaataagttcagttgctttcacatcgcagttagatgttttatactggatagtgggaggtgaattttcatgaaaaaaatgttagtagaatttagagatttcgcattaaaagggaatgtcctagaccttgctgtagcggtagttatcggggctgctttcggtaaaattgtttcatctttagtagataacatcattatgccacttgtcggtgtacttcttggtggtcttgattttacagatttaagtttcaaagttggtaaatccgttattcaatacggtgctttcatccagtccatcgttgactttatcatcatcgcttttgccatttttattttcgtcaaagtacttactagttttattaagaaaaaagagcaaacggtggaagaaactccagtacctccaactgaggaatacttaaaagaaattcgtgatttattaaaagaacaacagaaataaccgaaaaaaatccttctttttatagaaggattttttatttacattcgtgcttataaattatgttttctaaagctaaaaagttaggctatctatctcccttaatttcagggggggaaaataacctaactaaattctatttcaccgttgctgtttttttaattgtatcgctaaaaacatttccactgccgcgacaactaaaaagataatttgtaaaataaatacgtagccgataatcagtaattgtacaatcatccaaacagctaatacggccgccgctgcgaacataacttctttggttcttggtaatttttttagtaaataaattagagctgctaaatggaataatccaacaaatacgaataaaaatatgcctggtactaaataatccacaaacggtgaaccatcaagtaatccggttgaaagtgacagcaatccaccacttggcatgaaaaccatggataagccaccataaattgctcctattgctgtaaaaccaactattataatactacttatacgtgtccagttcatggcgttctcctagtcgtttttctagtagtataccacgaaaactttcattctgccgcttttcttcgttttatttttttgattaaatcgatcagtacgaaaaccgcaatgccgcatgcgacaactgtagtgagataccaagctggaccagattctgcgcgaactcctaaccaataagtcactgttttcgggttgaaaaatgcaaagcaaattgcacaaaatgcaataattcgaccaataatggaattttctctcatagcaagtgcatctccttttcttttattataacaaggaataggaaatgataacttagcttttcggtcccaaaattgtttttcatctaacaagttttggtttttcctcacaaaaaaactatgacaagggaattccctgtcacagcctcacagttatttgttaacaatgtttagtcgttgctcattgacgagtggataaatagctagttctttgctctctaaatcctcttggtgcatatccacaccagtaatttgactgtttccgtatgttctataataataaattcctttatcgatattgcaacacgaggaataaatagtatgctcgtattttcccccaccaacatcacaaagacctttttgttgttccaccgagcctaaaatatggaaaaattggctaatactttctgattcagaatcacctgaaacagaattcaatttggtaaaagttgctttcacaaaacgagacatagaagataaatcaccaggtaagccaattccgcccatcccacgactataagcatccaaatcaatctctttggaaaaattattttctggggtttcactcgaaagaacgcgataattgtttaaattaaatagttggtaatcaaatgttggattatttgttaacacgccaacaggattatcataaatgtgaagtccatctttcacacattccactacaatagattctgtttgatcagccatcaaccaatgtaatggagacagcggtaaattttcactaaaactaatattcacgagattgattctctgaagtaatcttcttgcttcttttacagtagcgcattgaccaagaatccacggaataaattcaaagggggtcacattgtccttaccttctgcaaaatccttgtaatccgcatttcctgagaaattgagtcctgccatactaaggcctttttcattggtagcatcgtaatacaacgggtagttttccatcacagcagcaataccaataagtgcataatgcttctctatatcctctaccttgcgaaaatggaacgggtaatttttcggcgtaacaaccacaacttctttgtaagaaagttcataatcgaaattccttccaaaatagtgatccttcgttgtataagttattgacgtacacattaaaaatccctcctcaaatttttcaccttacatgtataccagtaccctcggagtttggagtaaaacataatttgtggtttttttcacaaaaaaatgggcagtttattacctcatacaatatgatttggctcctttaaaaatttttaaatgtacactcgtctattaacctcttgaaaaaaattctgttattaaatcacaataaaaaagatccctggaaaaatccagagatcttttaaaaatgtccgctgatgttactcttacatcatgccgcccatgccacccattcccatatcaggaacagctgctgggccgttttcgtctggtttgtctgctacgactgcttctgtagttaatagaagcgctgcaacagatgatgcattttgtagagcggaacgtgttactttagttggatccacaatacctgcatcaatcatgtttacccattcgccgtttgctgcattgaaaccaacaccaactgcttcgtgtttcaagcgttcaacgataaccgaaccttcaagtccagcgttatgtgcgatttggcgaactggttcttctagagaacgaagcacaatgttgatacctgtttctacgtcgccttctgcttcaagtgctgctactttattgtaaatacttacaagggcagtaccaccaccagctacgataccttcttctacagctgcgcgagtagagttaagtgcatcttcaatacgtaatttacgttcttttagctctgtttcagttgcagcgccgactttaacaacagctactccacctgcaagttttgctaaccgttcttgtaatttttctctatcaaattcagaagtagtttcttccatttgcgcacggatttggtttacgcgagcgctaatttgtgtggaatcgcctgctccttctacgattgttgtatcatcttttgttacgactactttgttagctgttccaagttgatcaacagtagctgtttttagttctaatcctaggtcttctgtaatgacttgtccgcctgttaaaatagcaatatcttctagcattgctttacgacgatcaccgaaaccaggagctttcacggctactacgttaaatgttccgcgaagtttgtttagtacaagagttgcttgagcttccccttcaacatcttccgcaatgattaacattggacgaccttgttgaacgacttgttctaaaactggtaagatttcttgaatattgttgatttttttgtctgtaattaaaatgtatggtttttcaagaacagcttccattttatcggaatcagttaccatgtaagggctagtgtagccgcggtcgaattgcataccttctactacgtctaattctgttgcaaaacctttggattcttcaatagtgataacgccgtcgttaccaacgcgttccattgcttctgcgattaatttaccaacttcttcatcaccagaagaaatagcagcaacttgagcgatagactctttgctttcaattggtttagaaatagcttttaattcttcgatagctgttgctacggctttttcgataccgcggcgaacgcctactgggtttgctccagctgttacattttttaagccttcttgaatcattgcttgcgctaaaacggtagctgttgtagttccgtccccagcaacatcattggttttagaagcaacttcagatacaagttttgctcccatattttcaaatgggtcttctaattcaatttcttttgcaattgttaccccatcatttgtaattaacggagaaccgaatttcttctctaaaacaacattacgaccttttgggccaagcgttacttttactgcgtttgctagttggtcgacaccacgtaacatggcacgacgagcatcttcactaaatttaatatcttttgccattttatatttccctccgattatttctttttttaaaattatttagtaattgctaaaatgtcactttcacgtaaaatcagatagtcagttccttcatacgtcacttctgttccagagtattttgcaaagataactgtgtcaccttctgcaacttcaagtggttcttttgttccgttatctagcacacgacctgaaccgactgcaacaattttccctgattgcggtttttctttggcagagtctggtaatacaatcccactcgctgttttttcctctgcttcaagtacttcaattacaacacgatctcctaatggttttaacaatgtaaatgacctcctctgatataattacttttttcattttagcactcgacacatcagagtgctaatacagttattatgataccaaactgaataaaaaatgcaagcaaaaacgtttaaaaaaatagaagaattcttatttgcggtaaagcttcataacgagtacaataagaagagctatttccgcttgtttgaagcaatttagccaatgtttgtttatagaaaggatgcgtattttttggctaagcgttatattacgattgttttagtttatttgttattacttttttctgcatctgctgggattcctattattcaacatgttctacttagtacaacatccctttcaatagaggatgctgcatcttatggaatggttatttggtcgatattctctaatcttttatcacttgcgattattattccaatgctttatagaaaaccgaaagaaaataaaatcgaactcggtgaaaaaacgaaaccgcttctaagtattgtttggattgtcggaggcgtcattgggttatatgcggcacaaattgtttgtagtattatcattacgctgatttctggagatttaagtaactctgcaaatacggagttactagttgatttgactaaagctgcacctattttcttaattttcatttccattttaggtccaattttagaagaacttgtatttcgaaaagtggtttttggtgggctaagtaatgtgatgaatattcatgtggctgcggttattagttcgcttttctttggattacttcacggagatatttctttcttacttacttattttgtcatcggactaattctttgtttcctttatacgaaaacaaaacggattgtcgtttcgatgggcgcgcatattttaatgaatacgattgttttgctgttgagtctaggaattattgggggataatatgaaaaattcattaatgaagcaaagttttttatattttgcgctgggtcttgtatttgtatattttgttgttgttcgtgtggctgattatggttatgatgtgcttgcatatatactaattatcatgacattaatggattttggcattggcatcggtctgattatcactggatttaaaaggcgtaaaaaaacctgtagaaagtaagtttagcttaccttctacaggtttttttattctgttttcgctggataattttccaggaaatagattaacgtttgtaattccgttgtaaggtcgatatggtgcacacgaacttgttttggaacactgatacgagctggggtaaaatttaaaatacctttaacatccgcttcaattaaacgatctaccgttacttgtgcttcatcagctggaactgtcagaataactacttccacaccgttttcacgaacaatttcttccatatcattcaagtgataaattggaatgtcttgttgaacactacctactttcgctggatccacatcaaatgcagcaacgattttgatattattatttttcatgaaattataatgtaataatgctgtaccaaggttacctacaccgattagtgcaacatttgtctgtttgtcctggctaagtgttttgctgaaaaagtcgagtatgtaagaaacgttatacccgtatcctttcttacctaatgcgccaaagtacgaaaaatctcgtcgaatagtcgctgaatcaactttcaccgcttcacttaattccgcagatgatactcgttccttacctgactcatctaggtatttcaagtaacgatgatataatggtaagcgttttgctgtcgcttgtggaattttagttgtttcctccatcatgccttctgtcccttcttcttttaaattttttctgaagttgaagctattgtgaactgtacttcctttcacatgcttgcttatatactataaacatttcacaaggaatgcacaaactttttgctcataactttcaagtaaggttttgtcccgcaaaatatccggtgcagtcctctttttatattctacgctaaaatcacaaataatgcgagtgtattcacaatcttttttattcaagctgtcttggctatctcattgcgattacttagcttttaagataaactagtagggagaacgttcgaggagagagattatgatattattacaagttcagcaaatttctaaattcttcggtgcagaagttattttagataatattaaattagaagtaaaaacaggtgatcgaatcgctctagttgggcgaaatggtgcaggaaaatctactttacttaaaatcattgccggcaaaatgagttatgatggcggaactatttccaaaccaaaaagtgtggaaattggctatttggctcaaaataccggtctagaatcttccaaaaccatttgggatgaaatgctaagtgtgtttgattcactgcgaaaaatggaagctgatttgcgcaaaatggagcttcgtctcggcgaaccggaactctataatgatccagaaaaataccaagcactgatgacggattatgatacgttacaacatacttttaaagaaagtggcggctatacttatgaagcagaaatccgttctgttttaaatggattgcgtttttatccagaagattatgaagtagaaatcgcttctctaagtggtggccaaaaaacgcggcttgctttagccaaattactacttgctaaacaagatattcttgttcttgatgaaccaactaaccatttagatatcgaaacactagcgtggctcgaaacctatttacaaaattatcatggttcgttactcatcgtatcccatgaccgctacttccttgataaagtcgtgaatcaagtatacgaaattagccgaaccaaaatcgattactacaaaggaaattacagttccttcgtgaatcaaaaacaagcgaaactagaacaaatgtggaaagagttcgataaacaacaaaaacagattgccaaactagaagattttgttgctagaaatatcgtccgcgcatcgacaacgaagcgcgctcagagtagaagaaaacaattagaaaaaatggatgtgcttggtcgcccgcaaggtgatgaaaaagcagcgcattttggtttccaatttgaaaaacaaacgggtaaagatgttttaatggtagatcaactaagcattggttacgcgaaagataaacgcattgcttccaacctaacgttcgaaatgaaacgccaagatagccttgcccttgttggtccaaacggaatcggcaagtctactctgcttaaaacacttattcgcgatattccagctctaagtggcgaattccacttcggcgctggcgtgaaaattggttactatgatcaagaacaagccaaactgacatccaacaaaaccgtattaatggaactatgggacgattatccagagctgaatgaagtgaacgtccgtacaacactaggtaatttccttttttcagatgatgatgtactaaaaaatgtccaatctttaagcggtggcgaaaaagcgcgccttgctcttgctaagctcactttacttgaagccaatgtacttatccttgatgagccaaccaaccatttagatattgaaagtaaagaagttttagaagcagctttaattgattttgaaggcacgattctcttcgtttcccatgaccgctattttattaacaggattgcttctaaaatcgtcgaactagcgcccgaaaaagcaaccgttttccttggagattacgattattatcaagaaaaattagcagaagaaaaagaactggcacgacttgatgccgaggaccgacgcaaaaaaggcgaacaagttgaagcaaccgcctccgtcagaaaattaaactaccaagaagaaaaagaacaacaaaaactacttcgccaaagaaaacgaaaactagaagaaatagaaaaatccatggaagaaacggacgaaaagattgccgaactcgaacttcaattaacgaatccagaagttttccaagaccatgaaaaagcccttgaaatcactcaagagctagacgccgtaaaagctgacggagagaaattaatggaagaatgggaacaaataagcgaagaactggaatccatataatctacataaaaaaggagcaaacaatgaaaaagattttaattatttctagttcgattatcgttggtttacttgttattattaccatttgtgctagtttttacttatatagctatgctttagcgcgcgacaattcaagtatgaacgacacagcaacaacagacgaaacaactgacacagccaaacttgcaaagaaaaatcgtgaagcaaatgtcgcatggatggaaaagcaaaacctcataaaatggacagaaacttcagcagataatttgaaactcgttgctaattatttaccagcagatatcccttctaacacgaccattattttagctcacggctatcgtgggaaaagtggaaaagtcgagatggctggtctcgctagaatgtatcatgaaaaattcggctataatgtcttaatgcctgatgctagagcgcacggtgaaagtgaaggagataatattggatttggttggcctgaacgcaaagattatgtgcagtggattgaccaagtaatcgacaaaaatggtactgacactcaaatcgcactgcatggcgtttccatgggtagctccaccgttcttatgaccagcggcgaaaaactaccaaaacaagtaaaaagtattatcgcggattgtggctatacctcgatggatgccgaactttcttatcaattaaaagccatgttccacttaccaaaatttccgataatcccaacagctagtctgattaataaattcaaagaaggtttcttttttagcgaagcaagtgcggttgatgcggtcgctaaaacagacttacccattttctacatccacggtgatgctgatgcattcgtccctacttatatggtagacgaactttatgacgctacaaatagctataaagaaaaatggattgtcaaaggtgcagaacacggccaagcattcacggtagatccaaaaacatatgaagaaaaagtacgccaatttttaaataaaacaatgtaaaaaacagctattctctaagaactagatgctatcagtaggaaggaaaaaattggcaaataataagtaaatgtgttactatataaatgaaaagagagccatgcgtcaacatgactctctcgcaaacaccatttaagatggtgacagccttttatatgatttatttaaaaaccactagctgtcaggcttatgagtggtttttattttttgtcatttttgctgttcatgattgttacgattaagactgcaaaagcaatcatcagcgtaagactctcgaaaacagtcacacgtttatcctttccaggtaacgcctaaaaaataacataagcaccaccaactttctggatgaaaaaggccggtgcaccaccataaacttatttgcatcacaattatagcatgcaagtatctttagaaaaagagttggcgcgaaagttgtattttagaggcataatcggaaaattggcctaatataaatagactgcagtgaaagtaatggtccactttcactgcagtccgaagcgtgcggaacgaaaaatcgcacgctttttatatatcttccagcaataatcccggattcgcattcatatcaaaaccactacgttttccttgtaagaaactcactgtccctgcagcagcaatcattgcggcattgtctccgcataaggctaacggcggaataatcaattcggtctccggaagttctagttttacttcttgaataagtcgttctcgtaaaccttgattcgccgccacgcctccagcaagaagcagttgtttcacatcatattgtttagctgcgcgaatcgttttacttactaaaacatccacaacgcttgcttgaaaactcgccgccatatcgtttggattcggctcctcaccacgctgtcttaaattatgaagcgtgttaataaaggaagacttcaatccactaaaactaaaatcaaacgaaccctcatccatcatcgcccttggaaaatgaaaagtgtcttcgccgtctttggcaagtttatcaatttgcacgccgcccggataagcgagaccaagtgtgcgcgctactttatcataagcttcaccagctgcatcgtcccttgtctccccgataatttcaaactcattgtccgctttcattaaaactagttccgtatgaccgccgctgacaactaatgagagtagcggaaatttaaattcagtttcaaaacgatttgcataaatatggcctgcaatatggtgtacaccgactaaaggtaaattgtgcataaaagctagcgttttagccgcattcactccgataagtagagctccaactagacctggcccttctgtcacagctaccccgtctaaatcatccattgtcacattcgcttgttttaaggcctcttcaatcacaagtgtaatttgctccacgtggtgtctcgaggcgatttcgggaactaccccgccaaatcgtttatggctctcaatttgcgaagccacgacactcgatataatttcattgccattttttacaacagaagcagctgtttcatcgcagctagattctatcccaagaattaatgtattttttttcataagtccacccacatcactagcgcatcttctttcgtatccggataatagtttttccgaatggcgccgtcttgaaatcctaattttttataaagtccttgagcaacatcattggatacgcgaacttctaatgtcatccgaacaactccacgctctttcgcaactcgaatcatttctcgcaaaagtgcctcaccgtaatgattcccttgataatctggatgaatcgcaatattcgtaatatgcccttcatctaaaacgagccaaacacctgcatagcctaccacttgttccttatatatcgcaagtaaataataggcgtattggttaataataaattcattccgaaaagctgcttccgtccaaggtactgtaaatgctgcattttcgacattcataatacttttcaagtcagtcacggttgcttcccgaaataataaggcttcttccaaactcactcggaacccctcgattccaaccatttactctccgcttctgccagttttaaataatcaggaacaaaattgtctgctggttctccatctaaattctctgccagttttacgagagaactagctcgtgagtaagtataatctgcctgcgcaaaaaccgcccgctcaccaaggacttccgtcacagtcacacaaatttgttctgttaaggttcctacgaataaaatgagctcctcgctaggcgcgaattgttctagtaattcagttaacgcaatatgcccgtccgcgataacactctgcattttgccctcggtcacttgataaacacccgcgtacacatttccacggcgcgcatccattaaagcgacaacttttccaggaaagtacaaaccgttctctgctaaaagtgccaaagaagaaatcccgacaatcggaatccccgcatcccaagccattgtcttcgctaccgttacaccaatacgaagtcccgtgtaagaccctggaccttttgctacagcaattttttctaagtcagtaggttttactccacattcttccattaaaacagcaatcgctggaagcaaccgtacactatgattttttcttaaattcgttgtatattcgccgataacgacaccctcattaaaaagcgctatcgtcatcgtatcagaagacgtatccatcccaagtatcattttccaaaaacctccatcgcaagttgctcgtacctttgtccaactggcttcacaactatcttacgcgtattctcatctatatgaaaaagcttgatttccaagtattcttctggtaaatcctcacgaacaaactgcgcccattcaaccacgctcacacccgctccgtaaaaatattcctccagaccaagttcatcagccgaagtatcttccaaacggtacacatccatatggtaaagcggcaagcgccctttcttatactcgcgaataatagtgaaggtcgggcttttaatcatttgcggaatcaaaaggccttcacctagaccttttgtaaaagtagttttacccgcaccaagatcaccctcaagtaaaatcacatccccagcagttaaattttctccaagttgttttgcgagaagtcttgtctctctttcacttgtcattatcaattcgaattccattacctcacccgtccatcattttctctacatatcataccacaaagacgcgccaaaataaaaatcaaaaaaacgcaacgacctaagtcgctgcgtctttcgattgattaataattagttccacttatatccatatcgccatacatttttcttgtaatatcagtaattattttatttagctcttcgctagaaataacttcatcttttgtagggaaatcttcaattggaacaaattcttctgcttttgttttcaccgtaaagctaatagactcaggagcactcgcatcggatttatcttctatttttgtttgaagagtaagtgtatctaagctattctcttttcctgatttcacagtaagtttattactaatcaagtacgttttattttcttttaattctttcgcagcatctgttaaactcgatttcatttctgcatacgtggaatcaaaatctgttactgcatctgaaccttggctttctgcaataactttaaaatctgcttttactttttcatcatccattagtttagctacttggttcattaagttagcaatatcggcgtttttaattgtaacgctaacagtgccatcatccgcttctttaaaacgatctttttctaagccagtgaaataagtatcgattaattttattgcttttttatttagatctttcgaggctgcctcgatttcttttgtatttacagctgtttttgcctcaggttggtctgttaatgaacttgtcaattcttcagtactaagatatttattttttaaatctgggtaatcggtgttaattttagaccacatgccaccagtcgcttggtctaaataactaagtaaagaagcatcaggctctacaatagttttaagtggaatataggcattccctgttttactatctactaaaaaatctaaatccattgaaattggcagtaagttattcgtcgatgttacattgaattttgcttctgatttgtttgcttttttgtcagtggacgttgttacagaaagcttaatgtcttttaaaatccccatcgtttgagcacttgggtcagtgctagaaacatttatatcgtttacagcaaaagaagttgtatatgtatattgatcaggcacattcatcccatttttcattgtttgaacaaatttaccttgtggtgtttttgctgctttttcttccgcactttccccacaagcactaattactaatactaaagctaacaaaattgataataaaatcccttttttcatcattctcctcctaggtgattaatacattaaaactaacacactttaaggtctgaaaacaagagaatttacaatagttcatcagtctgacacaaattcctataaaaaaagcgttccttttagaaaggcacgcttttattttggagtcacttttaaagatgtagcattttcagatacttttccaggggcgggtgaagtaatatttgaaccttgtgggaatacagctctaacagtatcttcctctttgatgtcagcaagtttcattgcttttccagtggtcgcatttgttacggctgtattgctactcactgtaatcatgacttcacttgcgtaatcgtttttttcaccattccacgttaatgtcccattgactgtcaactcattattattctctaacaaactagtatccgttattgttccgtcaaggactaaagcaggcacttctgcttgattacaacctgctaaaaatagtaccactagtaaaaccggcaatattacctttttaaaacctgtcatcactctctcgtcctctctgaagcttatcgttctttctagcatagcatttagcagaaatacaggcaattgttttcttgtttcttaaacaattcttatacaccaagcatcataccgagaaaagccgctattaagccaaacacatacgtaaaacctagataagaaaataacacacgataattcgtcttccattttaattccatactttccactttaaacgtagaaaaagtcgtatatcctcccataaatcccgtacctaaaaaaagttgccaaaccggtccaagagcagaggaaacaagaaaacctaataaaaatgaaccagtaatattaataaaaaaagtcgcagaaggaaagtttgttttccatttgcttttgaccaatacagaaattccatatcgtagcatcgcaccaagagccgctccaaaacctacaagtaagaaattaaccaacacgatgctcacctcgattcaaaagcttattgctaagcatccggccaaacttcaccataataagccctccaatgaaactagctagcacatagctaactgcaaataaccatgcgccactttgcactagttgaattgtatctacactaaaagccgagaaagtcgtaaaggcgccaataaaccccgtcccaatcccgttcaaaagcaccaatgaaacacgtgatttttccgccaaaaatcgcataagaaaagccaataaaaaacaacctattaaattaactgctaatgtcgcagaaggaaaatccccgccaccaagccacaaattcattgcatatcggcacataccacctaatgcaccaaaaactcctacatataaaaaatacatctccaagaccccacttcacaaaaaaactaccctgaaatatttgcattccgggcagtcgcctttgtcctatttctactatactataacgcaaaacattccaattattcaactcaccggaagtcgaaggatggtcttcattttttctggatccgccttgcgcggatcactcaaataaatttcgtggtgtttacgaactgctcctgtatcattatgaagcccctctgtttccatgaattggtgtaattccgcgaccgttttcacttcttcactaaaaggaccaatatgcatcatttgcacacattccccttcttcaaaacgaaccaatttcacacgactcgtatcgacatccggctttttcttctgagcaacctctttagcccattccaacacttcttctgtgacaaaatctggttgtctaagaatggatgtccaaagccacgcatctctgtcctttaaatcaaacttctcttcagaccaccaaaacccttccagcggcggtacaacaaaatccgcgtaaccattcagacgcgtctcgcccatcttgctcattttaatcgtgtacgcaatcgcataaagagactgcactgccttttgatactcctcaccgtccggatcacctttaccatccaccatcaaaaaattcatttccggaacaaaaatacgctctggcttccttttaggcgcgtagaatttcttctcttcttttttaaaatcaattttcttttcagtcatttgaattcctcctcgttcatccaattcggcactatcttttgaaaattatcgtgactagctgccgtctttactgcataatccatcaactttttaaaattacgagattcattttttgccgcccaactaacagccgaagtaatatgcatcgccgtgtaaagcgcataaagattccaaaaatccgtaacttcttctttatcaatatagcctaaaatatttcctcgtgcaaaaggtatactgacctctgttgtaaaaaagccgattttagctaaatcaaataaaggatcaccgaactctagccgattaaaatctattagccccacaaactttttgttgtttaaaataatattcgctggatgaaaatctccatgctgtaaacaaatcggtctattttttaatctagctatattcttataaacaaacttttcagtgtctgttaaaaaagaagctgttatttctaattcttttaattcctccacttttcgtttaaatttagctgtttgaaaatccaaccagttcatttttggtatatctagcggtattttatgaacttctcgtaaaatttcccctgccgaaaaaccagctttaaactgttctgaatgagataaatgagtcatgccactttctgcgtcttctcctcgcaaataactaataatcatatagccttctctttcgataaaaccgaaatcatatgcttttggaacaaatggagtttgagaatctaatgcttggattattttaaattcttgcttccgttcttgaagtaagtctatgggaaaaacacgaacaaggtaagtttcatccacctggtatttcctatcaacagaaaaacctttttttatttccgaaattactttcgcattatgcaacatttttaattgtgtcacatccataattagctctccctcctataaattcgctattctccattatacaagaatacgcttacttttttccaattatctacgtagaatttgttgacaaaatactggaatcaatattataattagttttgctacgcatacgcggtcgtggcggaatcggcagacgcgctaggttgagggcctagtggggtaaaacccgtggaggttcaagtcctctcggccgcatcaattaaaaaattccaaggttagaagctaaccttggaatttttttgtatctttaatatcttctataaacaaataacccgctagctacgacaataagcaatcctgtaaaaatcgttgagctacttgaactatcgcccgtttgcggtagagcggtaatttttgtcgtttctccacttaccttcaccactgtactcccctttgttggagttggttttagaggtaccattattttattatcactaaaagtaatattaatagttttttgaggattaaatggtatcgttacgcgaatttcattggctgatttttcataaccaggtggtgctgttacttccgttatgacataagttccgggttgtaagttttcagcaagtgcataacctttactatttgtagttactttttttaatgtcgttccatctattgactttacgtcgaaaacggcatttgctagaccttttttattcgcttcatcttgtttaaaaatagtaattgatcctgttttctcagcgttttgaaaagtgagtttgacaggatttgtatcgccgtacgtgatagtaaatttcttgggtgttgtgtttttctgatatccaaggggtgctgtaacttcggttgctgtataattccctggtggcagtccttctgcagttcctgtcccattttgattagttgttatttttgctacttctgattgagaattatctttaattgcgtaaaccgctccactcagtgccttatctcctgaaagtttttgaatttccactttaccattcgtcgttattcccgcatctatatcaaaattctcactttttaaattaggtacatttactgaagcaataccagttttatctggtttagaattaaggctcttgtcattaccttgatttgcttttgaaaaaataaaatcattattcggtaggctaaatttcacttgatagtcccctggcaaaacatctgtgaataaataagagccgatattatttgtggtcgcactttctttaaacgtaccatctttcgttaataaatctacctttacgccaggagcaggttcttcgctatcttgctgaataccatccccattaaaatcataccaaacaacatcgccaatttttgcaccgtttacattaatatataactgaacatcatctaaaaaatttccgcttgtaagtgaaccatttgcagttgaaattgggttaaaagttagtcttgtgatagtttgtccagctggaaccgtataattcccttcaaaactcccccacgtttccccattagaaactctcgatacctccgtttgactttcgggtgaaccaataagcaaatcggctgtgtctacaccagtacgacctcgatgcgaaaacttccatgttaaattcgaacctgggattgtccgaatatcctgataaactggtccaataccatctgaatttaattcaataaagttatttcccgaaaaagcaggcacattatatccattaccattttgccatacttctatatttccagttggattagttgtgccccaggcatctacaccagcttgattaaccatccatacatttgttgtaccagcattttgaccgtaatctgtgatatcaacatcttcaaaatcattatttttaatagcccattttaactgccagccatttgaagatgttggagaagcttgcactttttcagaagtacttccaataataagcaacaccattagaatgaaaaaactacctattaattttctttgcataccttcccctcccttttccctgggcctaacatcattaaatacccataaaacagcaaaagaaaacagccagtgttgcaaccagctgcttttttgtttatgacaaaatatcgtatgccattttatattttgttgatttggcgaagtgtttacttgcatgctttttgactcgttcaattaatactgggtcatttgacgcatcaatctttttcaataattttatcattttcttttcataacttacttgctcatcctgttgatataaaagcaatatttcggtgtattccatgaagtaattcagttcttgcactcgctcaactactttattcattagccccattaatgaagttgcttcttcaacaaaacctttttccgcaaaaataaccatcagttctgttataacaaggtaatcgttgttgttaaagcttatattagtcgttttgtaggccattatttctttatacaaacaggttattttttcataaaatagcgtctcatttccctcaatattttcaatttctgccatttttaactgaacgacgaaataatagatttttttagcttctggatatttggaaaagtacttttgtgcttgtttaaatctgtattttgcctcaccaataaagccaatttgaaaataaatgtaaccgtagaaatagagaatagagacaaaacgttcctgctcttcatcctttattaaatcccacgcttgctggatatgtccaagtgcgggttcataaatactttggcaaatataattaatgcagatgcacacatgaaaaacagtaagaaaatttttattatcagtgagagcaacgcacttctcccagtactccactgctaattgataattacacgttgcatgagaatgttttactgcctgaccgtaataatagtaggaaagcaattggagcgggaaagcattttccactcgtttttctgcgttctttaaatatttagcttccacttcttccgctcttgaaaatttccaagtcttataataaaatgccacctgtaaacaataaaagctaagttcgacagctggtgattcgtgctgtagctctacattttcatctattttctttaatctactttctatttctttaggattagaacaaaccaatagttcaaaaatctcatccaattctttcaaaagtgctctattctcttcatcttcgctcatcaataacacttcttccggtatttctaaccttcttgctatgtgtatcaacgtttccaaagaagcaactttaataccattttctatatttgctaaataaggaacagagataattccttgcgctacgtcttttaatgtcagctgtttctctttacgaatatttttaattcgcaaaccgattaagttcatgatgtcaccgccgtcttttcaatattttcctcttaattataaacatttcgaaatggaaaacaaccactttttccagctacttttttgctttcctttttatattttctaaaaaagcttgttaaataagcttgtttaaactactaacctaaagcgttcgcccttacatagaaaacgttttagatcaaaaaaagcatgattgctcttggacctaaaacgttttgttatatttgctcctgtatagctattttgaaaaaagcttcactaatttgtcataatcatcgctgtggattttttgttgtccggcataggtgaaataaaaattttccttttgaattcctaaattccacctaataccgacattttattactttttagtttgctcccacatgcaaactattccgttaataaaacaacaagttttatagactctttcccttatcgaatctataaattttctctacacattcccttttaaaacctgtctacgcaaaaacggaaacgtagatttttattttaccattcaaattcaattaatctctaaaaaggaaaatttatcccacttccgcttttttaagtctatttttagtcttaatttcctaaaaagacgaagatatcatctatcttcgtctcgtttttatttaaataaaatatgttttttcttcatatagaatacaatggatgctgctacaatcatttctgaaatcggaattgctagccaaacgcccgggataccaatgattggtggcaatactaataagaaaattaccatgaagataatttcacgtgaaatcgtaatccatgtagccatttttactttgtctgatgtttggaagtaagtcatcataacaaagttgaagcccatgaaaagataagcagtatagaataatttgataccattgcttgctaactctctaatttccacgctaaagttaccgaacattgaaacgagcaaattagaaccaaagaagccaacaagtaaaaagccgaccccggtgctaaatgctacaacaatcgcaattttcaatgtttccaattctttttgtctagctttcgcacccctgtaatagctaataagtggctgaatcgcagaacccattccaaggaacaacatcaaaatcacactatgcgtataattgaggacagagaacgccgccacgccagcagtcccagcaatagccgcaatcgaaatattataacctaacgtaaatacagatacaccaacttctgccaaaaagctcggtaagccaatcgccaatgttttcttgaaaaaagctttgttccagtccactttgacaaatttcaagcgactcgattttttgaagaaatgggtagttaaaatgagtacaccgataatgattgctatcatcgtagcaagagcagagcctgtcacaccccattcgaacacaaataggaataaatagttcaaaataacattactgattgccgttacaataagcgcaatcatcgataaattaggatcgccatcattacgtacaaaaatacttaaaatattttctagtgtaagcgcaaatccaaatacgagcaggatattcatatactcaagcacataaccaatcgtatcatcattcgcacctaaaaaataagctaatggcactttaaaaataaacgctataattccaataataacagtgattgaaacaacggctagaatcgcattggtgaaaatcgtttgtgctttagcgacatttttctctccaattgcaaaggaaaactgggtcgccgcgccaattccaatccagatagaaatcgctgtaaaaatcgtaaataccggcaccgctatatttatcccagcaagcgctactccgcctagcttatgcccaacaaaaattccatcaatcacaatatttaaagacattaacaacattcccactaaggaaggaattaaatatctaaaatagatttttttaactgaatctgtttctaaaatttccatattttttgccatactacacctctaattcaaagcttttagcgtaattcctctccagaatatttgccataaagccgtgattttcttttccgttctttccgggtcattcacgtacacaatgtctacgataactgcatcaagaattcccatgtatgcttctttcatcgtttccacatcttgcattgggattaacttttgttccatccaattgctaaataaatcagtaaattcatgttccatttgcagcacgttctcggtaatatctgcttggaccacttcatacaaatgctttggcggataaaacccgtaacgtaaccaaaattgatatgcctcgtcagtatcgtataattccttcacaccaaaaagtaaactagacaaaacaagatctggtctggataagtcactatctcgaagttttgcccggtagtaatctatttctgttgatttagcgtccttcataatggataaaaacaaatcatctttatctttaaaatgagaatagatggattgtttcttcagccccaccacaccagcaatatcagcaagcgatgttccttcaaaaccattattagcaaaaagtgtcagtgcagcttgtttgatttcttcttttctcatcattccactcctctcacaaaaactgacgaccgttcgtaagtcattttctcatgaaaaaaattctttgtcaacaaaaaaatccactcttttaaaagagtggattcatggatttatttttcttctaaaaattcgctaatcaattcgtatgtctcatcggtcgcttctgaattagttgtcatgaagccatgtggaactttttcaaaacgtttggcaaatacttccacgccggcatcttttaatttcttcgcatatgcttccccttgatctctaagtggatcaaattcagcagtcgcaataaatgttttcggtagtccgactaaatctttgctacgtattggtgcaacgagtggatcgtatttacgatcgcttgcattcgcaatatataatttaaagaatttatctaatgattctttcgtaagcacgtagccttctgcaaattcatccattgacggatatagaacagatgcatcacggctaaaaatatcagttgctggataaagtaagatttgagcagtaatatttggttttcctttggatttagcgatttgtgtaacaacggtcgctaagtttccgcctacgctatctcccgcaacgataatgtctgatgatttagctcgtaagctagtacggtgattttgtacccaaagtagcgccgcatatgcatcctccactgccgctgggaaaggattttctggagcaagtcggtaatcaacagtgacaacacgagcacccgtagtttgtacaagttttctagcaatcgcgtcatgcgtttgcaagccacctaaaacaaatccgccaccatgataataaacgataatttcgaaaggtccgtcttcttgtggcgtataaatccgaatcggaattttgccagctggaccatcaatttttttgttttcaacatcgccaatttcgatatcttttgctgaaggtaatgcttttgttgctagtctcatatatttatatcgcgaatctacgtcggataatggtgacgtgtttttcacaaattcctgtgaagccttatctaaattctcaagaacctcaggattataatcttttttcccaaccgcttttttgtaaataaagaaaacgattaataatggaagtagaataatcccagcaaaaccgatagcgatccattttattgtatttttcacattcgctcaactccttcaatataacttcattaacaagtatagcagttttacgaacaggaaccaatttattactatttgaaatgattatttttatttagaaatgtatttttaagcataattatgaataaacgaaaataaaaaggttgatatctaaaagcatcggtgttaatataaatacaaatgtttgtatatttatgaataggggatgtttaaaatggcgaaagaaaaaatcgtattagcttactcaggtgggttagatacttctgtggcaattcagtggttagtagaatcaggttatgaagttattgcatgttgcttggatgttggtgaaggcaaaaatttagattttattaaagaaaaagccattactgtcggagcaagtgaatcctacacgattgatgcgaaagaagaatttgccgaggattttgcgttaattgctcttcaagcccatgcttattatgaaggaaaatatccacttatttcagctttaagccgtccgttaattgcgaaaaaattagtagaagtcgctcgtcaagaaggcgcttctgctatcgctcatggttgtactggtaaaggaaatgaccaagttcggtttgaagtagcgattcatgcacttgctcctgatttaaaagtcgtttctcctgtccgtgattggaaatggtctagagaagaagaaatcaattacgccaaagaacatgacatccctgtcccaattgatctagataatcccttctcgattgaccaaaacttgtggggtagaagtaatgaatgtggtgtgcttgaaaacccatggacaacaccgccagaggcagcttacgacttaacagtgagtttagaagatgcaccagacacagcagatattgttgaaatcacctttgatgctggtattcctatttctcttaatggagaaaatatgagcctagctaatttaattcttactttaaatgaaattgctggaaaacatggtgttggtagaattgatcatatcgaaaatcgtttagttggtattaaatcacgtgaagtatacgaatgtccggccgcagtcactttgattacagcacataaggaattagaagatttaacctttgttcgtgaagtggcacatttcaaacctatcatcgaacaaaaaatcagtgaaacaatttacaatggcctatggttctctcctttaacagaagcattagttgccttcttaaaatctacacaaaaattcgtgaacggcaccatccgcgtcaaattatttaaaggtcatgccattgtagagggaagaaaatcgccaaattcactttatgatgaaaacttagcaacttacacgtcttccgatacatttgaccaagatgcagcagttggtttcatcaagctttggggattaccaacaaaagtgaacgcagaagttaattcaaaagtgacaataacaaccgaggtgtaaaaaatggaaaaactatggggcggacgttttcaagggaaaagtgaagcatggattgatgattttggagcttcgatttcttttgatcaaaaaatggcaaaagaagatttggcgggtagcttagcgcacgtcgccatgctcggcaaatgcgggatcattcctgcttcagaagcagctgaaattacggccggattaaaaatcctccaagaaaaattagcgtttggtgagctcgaattcagcactgttaacgaagatattcatctaaatatcgaaaaactattgcacgaggaaattggttctgttgctggaaaacttcatacggcgcgtagtcgaaatgatcaagttgcgacagacatgcatttatatttaaaacaagccgtggcggaaattattcagtcgctaaaacatttacgtgtagtgcttgttcaaaaagcagagttgcatgttgaaacaattatgcctggctatacacatttacaacacgctcagcccctgtcttttgcccatcatttgcttgcttactttggaatgtttacgcgggatttggagcgtttggaagaaagtgtcaagcggattgatatttcaccgctcggttctgcagcgcttgctgggacgacatttccaattgaccgggcttatagcgccgaattacttggcttttctgctgtttatgaaaatagtttggacggcgtgagtgatcgtgattttattattgagtttcttagtaacagttctatcttgatgatgcatttatcgcgtttttgtgaggaattgatactttggacgagtcatgagtttcaatttgtcgaattaacggacgctttttcgacaggaagttcgattatgccgcaaaagaaaaacccagatatggccgagttaattcgcggaaaaactggtcgggtttacggaaaccttttcggcatgctaacggttttaaaagggttgccgctcgcttataataaagatttacaagaagataaggaaggcatgtttgatacgcttgagacggttcagacaagcttagatatattcgcgggaatgattgaaacgatgaaggtcaatacagaaataatggaagaatcgacgcaaaaagatttttccaatgcgacggaactagcagattatttagcgaaaaaaggcgttccatttagagaagcgcatgagattgttgggaaattggtgcttgaatgtacgcaaaatgggatttatttgcaagatgtagcgcttagccactatcaggaaataaatccacttattgaggaagatatttacgtggtgctttcctctaaaactgccgtgcaaaaaagaaattcttacggcgggactggatttgatcaaattaaagtcgctctcgaaaacgcgaaaaaaactttgtaaaactaactgggatgctgaatggcgttccagttttttgctgatttctccccctttttcctcttagctgatttgtcagagcactactttttttgttactattaaaaagaatgttacctttttgctaacatggggaaatacatacagagaaaataaagggaagtgatgtattgaaaaaattaacaaatgtcttttggggatcgggttttctagttttattagcagttttatttggggcttttttgccagagcaatttgagacttttacaaaccatatccaaaaatttctaacaagtaattttggttggtattatttaatcgttgtagcgattattattatcttctgcttgtttttagttttaagtccgattggctcgattcgactcggaaaaccgggtgaagaacctggttatagtaataaatcttggtttgcgatgttgtttagtgctggaatgggaattggcctcgttttctggggtgcagctgagccgttatctcattatgcggtccaagctcccggaggtgaagttggcacgcaagcagctatgaaagatgcgcttcgttattcattcttccactggggaatttctgcttggtcgatttatgcgattgtcgctttagcattagcttacttcaaattcaggaaaaatgcacctggcttaataagcgccacactataccccattttaggcaaacatgcgaaaggtcctattggacaattgattgatatcattgctgtttttgcgacagtcatcggtgttgcaacgacactcggtcttggcgctcaacaaattaatggtggtcttacatacttgtttggcgttccaaacaattttactgtccaatttacgattattgttattgtcactattttatttatgttatcggctatgtccggacttgataaagggattcagcttttaagtaatgtaaatatttatgttgctggtgttttattagttttaacacttattcttggacctactctattcattatgaataacttcaccaattcatttggtgactacttacaaaatatcatccaaatgagttttcagacagcacctgatgcgcctgatgcacgaaaatggattgactcatggactattttttattgggcttggtggctttcttggtcaccgttcgtcggaattttcattgccagaatttcacgcggtagaacgattcgccaattcttacttggtgtaatcgtgcttcccgctttagtcagtgtgttttggtttgccgtatttggcggttcggcgatttttgtcgaacaacatggtaattctggtctttcaagtttagcgacagaacaggtactctttggggtctttaatgaattcccaggtggcatgatgttatcgattgttgcgatgattttaattgcagtcttctttattacttcagctgactcagccacatttgttctcggtatgcaaacgacgggcggatctttaaatccaccgaactccgtcaaagtaacatggggattactccaagcgggaatagcaagtgtgctactctatgcaggcggactgacagcgcttcaaaatgcgtcgattatagcagcctttccgttttctatcgtcatcatcttaatgattgtttccttattcgtttcgttaacgagggaacaagaaaagctaggattatacgttcgaccgaaaaaatcacaacgttctcaactataataaaaagggatgaaaatctacaactagattttcatcccttttttcatccttttttctgctttgccgcgactatttcgcgatagctacgagtttgtttaggatatttttttcgaaagaaatgttgcgaaacaactgctaacacgagagaaatggcggtaattggaatagagcttttaaatataccgaccatcagtagtaaagcactggcaaataacgttgcattaaaaaggaatttttccattagttactcctccaaattataatttaattcgcggtcatgagctaatttttttatacctaaagcatcgaatactaacgctttttcagcaatgtaggcattgtattcaatacgctctagcatgtcgtatgctttatgaagtgatgtatctaatacgacaataccatgtttatttaataagcttgcacttggaacggctttatcccctagctcgataacgtgtttacgaacgatttccgcaagttcggaactagtcgctggcgcaaaagcaagggttggaatttgaccgattttttgcgttgcttctgttaaattcggtaactccataccaagtgttgcaaataacatcgattctttcggatgagcatgaagaacacagccgatatttggattttctacgtaacaagcacggtgtaagttaatttctctagtaactcttccgtctccttccactacttcattgttattatccactacaaggatttcatatggggaaagatcgcaaagttttgcttgactcataagtgtaggtgtcataataatgtgctcactattcatgcgcacacttacatttcctccagctgcattcgtttcaaaacggtcaaacattgtcttcactattttcgctaaatcttcacgttctttttggtataacatattatctctcctccaattgtataatacttacttgattcttgagttttccagcagcttctaaatcaaagctcgaactgtcttgttgcatgactttgctagcggaacaacctgtcgcgacttttaacgtttctgtaatcggcatattcatcgcaagtcctgcaataaatgccccaacaaacacatcgccagccccggtatcatttcgttcctgaacttttggtggaataacttgatacaatttgccattatgcgcgcaaattgacccttttgctccaagcgaaacgaccagataggggattttttcggctaatttgcggacattttcttctagtgaattggtcttctcatccaaaatagcaatgacttcatcttcatttggtttaatgaaatcaacacccatttcgaccgctaagtttaaatattcaccagaattatcacatccgagaaacgcgcctgttgctttgacagttcttagtagttctttaaaatcagataatgtataatgaggaggcggggatccagcaatcaccaccatatcctcttttttaacttttttagcgatttgttttaaaaggttcactttgttggtctgacttacggtaaaaccagcttctggtatcatcgtgctgccattcgtgtcatcactcaagacgacgaagcattctcttgtggaagttccagcttctacaaggaaatcatggttgatatgtttttcttttagaatggcatatagtttgtcgagattgtctgatcccgcaattccaagtgcttcatttttaattccgaatttcgataatactcctgaaacatgaagcccctttcccccgcaatcaaattccgtttttttgacacgattagtcttccttttttccaactctccttgaataaaaagcaaccggtcaatggctggatttaatgttatcgtgtaaatcatctcatcactcctatttcttaagagctagctttttctagttcaattgttcgttttttcatcattttcacgtaaaatactagtaatactacccaaattgcgacaaaaataaatcctaaaatagtgaactgacttgcttcagcaaagatataacggaacactggatattcaagcgtactccatgtaatttgttgcccagcttttagcgaaattgcgccggttgaatgcgctaaatccgtaatagttccagcgaagaaagtagatacatataagaaaattggtgttgtaattgttccaagaataatcatgcggattaagttcccaccagttacaattagcgccggtgcacacaaggaaatatttaatattccggcaaacggtaatacgccatttcctggtaaaataagcgcgaaaataagtgtaactggaaccatcagaacgatcgctacccacacttcactacatcccgctaaaatcggccaatctaagccaataaacaattcacggtttttaaatttacgtttcatgaactcagaaataccatcagatagtggtgaaagagcttgcataaatagttttgcaaccatcgggaaaagggttaatgctgcagcagcttgcatggctagcatcagtgttttagctacatcataaccagcagcaacccctagaagtccaccgattataaagcccatcacatggttttctgcaaaaataccaattttatcttttaacgcattggcatccatatctttccgaagtgctggaatttttttcagtaaccagtcaagcggcattaagaaaatacagaaaatcatcatgccgtgagaaacggttacacctggaattccatttaactcttgaatttgacgttggttagcatcacatagaattagttctgtaacaatttgaattccggcaacaataaatgctaagtaaacattttgtgttacaccgataataagtacggctgttaaaattttgccccaaacgttccatagatcgacgttcaaggttttcgttttattgataacgagcataatggcgttaataccaagttgtagcgggaacatcaagaaggcaaatggccatgcccaagcaagtgttgccattgatgtccatcctccatctaagatgcttaaattaatccctgttctttcagcaagtccttgtgcagctggcgttaatgcttcaatcataaagccaataacgatattcattccaaggaaagctacccctagaataatccccgcactcactgcatctcttactttcattcgtacaattagaccaataataatcattagtgctggaacaaaaacggcagctccaaggttcaaaataaactgtataactgattgtaatgactccattttttcacgctccctgttttatctggtttattttaaggcgttaagtaatttttctgtttcttcgtccatgcccatgcctgttaagaaagcaataccattcaatgttggaatatcgaattctttatttgcttttgtaattgccacatatacatcacttgtcttaatatgttgctctaaagacttaatatccactgcttctactgttgcgcgaacccctttttcttttaaaatacgttctacttttgatgccactgtttgacttgttgctacacctgatccacatgctacgataacttttttcattgtaatcactctccaaattgtttttttaggaaatcacataaagtattgctatcatttatttcttttatttgttccacaaagtctgcttccataaatttttccatgatacttgaaagcagtggaacttgatcttggggatttttgattcctaacatgaaaattacttcgacatcaatccacttatctaccgttcccatttgaacaaaaggaatcggtgtagaaagtttatttacgagtacaaaaggacgttttacataaatcgtgtctgtatgaggaattgcgattttgatgccattcatctcgagtccagtaggaaaaactacttctcggcttgttaccgcttctctaaaagtcggctctacatactgctctttctctaatatcttactcgtgtattcaaaaagttctgcctgactctcgtatcttgaatttatcagggttaactctttttgaaacaaatcatggtaatccacgcgacgctcaccccctttcaaggatttcaacgattttctttttgttagtagaagcgagaattcccactaatttctcaggcttcaagaaaatttcgttcaattttagtaataatggtatatgtttgttttgttcagatggtgctaaggcaatcatgattttgaccgcttcatcctcaggggtttttgtgttcgctttcattatcatcaactgaatatcttgctcaattaccccgtttgcgggtttggcatgtggcaaataaatattcggcccaatcatcatctgctcataattttgatagaatatttcttcacaagtatgaatgtaactagcatccaccgttcctcgttctaacattggtgcaaacgccgccgaaaccagttgctcccactcaagtggcatttctaagaagtgaacctgctcttccgtaattcgcatttgttctggttcttttttctccacaggctgctcttttttgttaaaaaatgactctactttggcttgcactaatcgaatattttcttcggggatttcatcttttagcatagcgagtagttctttggttttcttatgactgtccatttcaatagctttatcaacttgttctctaaggatttgtcggctgtctttacttaaaatcgacggaattacaaaaatggtggcgtcgctttgaactggaacagtcgtaaaaataaaatcaatatcgcgggcgaccgtatttaattgccgcaccgcataagcaccttgaaaatcaatattcggaaacatcattttcaagttttctagcagtaatttagaaatggatgtaccacttttacaaaggacgactgcgcggaaaatcggctgttccgtttcctcgatttgatacatccacccaagaactatcatcgaaagatacacaatttcctcttctgaccacttgtgaccaaccaatttttcaaaaggtttggaggctttttctacaatgttaaatgtcggggtatattctttaataaactgttttttaagtggattattgatttgaaatcctagaatcgtccggtaaattgctggtctgacatgtaaaattactttttctttaaattcatttttcttcatgatttccgtcgcaaaatacatttctagtaaacgaatgaactcgtcgactgcgtaggcgatttcttcactgtctgagaaatgaagcgccgactcgactaagttcgaagcgaggacttgtaacgataagtacaacaaatcgttttcacttaaaaaatcataaccccaaaacatttctttcattatcgggaactcacgggtatttttgatgtcatacatttcaattttaaatgtccatttcttgtttgttactttggatcgtttgatgatgccgtggagaatatagggcaattcttccatctgctcatctgtaaaggtaatttgaagcttactttcaaccttttcaagccgtttttttagtaaaaatacttcgctcacagtaatcagcttcttttcatcaagtacgaattttccgtatggggtctgaacgacttcgcgaatgagttctgctagtaaattacgaatcagaaattctgaaccagaaacagcgtagccatctttccgcgagtaatcgagctgaatttcaaactcatgcagactctctttgatacttttaacatctgtaagcatggtgtttttacttacataaacatagtccgcaagcgcgccgagtgacatataatgattatgtagcagtaatttaatcatgataagtttgcgacgaatatttacctcataaaacgaaaacagctgttgttcttccgcagttaaaagccggtaacaagcttccctacatacatctgtaacaaaaatcatgtcatggtcaatcaaaattggttctgactttagtagatggtttatttgtgtaatctgtgcgccaattgcttcttttgatactttaaaattcttggaaacatttctaagattcacttgtcgattcaagagcagataagtaattaattccttacaattctgttccatctactttcccctcccttacattaatagtaaatgataacccttacataaaaatgatgattcatcacaaattcgcttttggaagaaagagttattgtgatgagttatattttaggattactttctattatagaggagaaggatttttaggggaatatcaaaaaagtgcgagatagcgttaaatcacgcttcctcgcacttttttgatactaatatttgttttattatttcagctacacgtctcgcttccttcttttcaagacgtgcataagttacgcgaataacagcttcttttacaccaaataaaaatcccggcatcacgagcagatcattcgctaaaaatatatcgaaatcacgaaccgaacgaaattcgactggcaatttcacccataaatgaaaaccaccttttggcttaataaatgttacttcactcggtaaaatggcttcgaatgcttcgattagatcatctcgacgctgttccaatacgtggtgcaattgcagcaaatgtgccttgtaaccggccgtatttaaaacactatttgctagtacttgcgggaaaatgcttaaaccaaaatccatctcttgtctggcaagtgcaagccgttcaataactgctgtcggaccaatcagccaaccaattcgtgtagtagatcccatgatctttgagagcgatccaatatataaaacattatctgtatccaatcgtttcagcggtgccggaatttggttatccagcgcacccagttctgaaaatggatcatcctctacaatagggatttgcaaatgagcacaaattttcacgagttcttttcgtcgtttcaaactcatcactagtccagttggattttgaaatgttggattaacaaagaccatttttacgcgatgtttatgatataaatcacgtaattccgaaataaccacgccgtcttcatccattggtaacgcaaaaatccgcaagccggctgactgaaacaacgatagcgaataaaagtatgacggtgactcaattgccacagcatcccccggttttaataaacattgtgtaattaaaaagagcgcttgttgtgcacccgatgtaatgaaaatttgttcagatcgcgtttgtaagccataagcttctttcatctgcttttgaatcgtttcacgcagtggtttgtagccagcttcgtcctcctgttgttcttcagcaataaaagactgccaggaaagactcggtgtttccattttcggcgtcatttcaagcggtaattccccgcttgcagcatcaatcacgttatccgaattggcacgttccattactcccgcttggcgaatataaggaactgctggcgtaaaaccaccttgcgttaaataatgccgccaattggttgactgccccgcaaaaagtccccatttttccgcattaaccgttgttccactaccttgtttgcgaatgataacagcccgcgccgtcagttcatcgagcgctcgcacaaccgtcgaacgattcacaccaaacatctccgccaactgtctttctggaggcaatttttcttctggcaaaagttcaccattcataattttcgtttcgattaaatcaacaatttgtaagtaaatcggtaaactcgaatttccagttagtcgccacatccgttcattcctcctatataaattggatggagaaaacaacatccaattggctgtttttacgaaatgacttttagcttatcataatagtcaggtaatttcaattaactttgatggaggttattaatatggagaaaaaagttggtacagatcgtgtaaaacgtggtatggcgcaaatgcaaaaaggtggcgtcattatggatgtagttaatgccgaacaagcaaagattgcggaagaagctggtgctgttgcagttatggcgcttgaacgggttccttctgatattcgcgcagccggtggtgtcgctcgtatggctgatcctcgtattgtggaagaagtaatgaaagctgtatctatccctgttatggcaaaagcacgtattggtcatattacagaagctcgcgtccttgaagcaatgggcgtggattatattgacgaaagtgaagtattaactcccgctgatgatgaattccatttactaaaatcagatttcaccgttcctttcgtatgtggttgccgagatatcggtgaagcgctccgccgtatcggtgaaggtgctgccatgctccgtacaaaaggagaacctggaacaggcaatatcgtcgaagcagtccgtcacatgcgccaagtaaacggccaaatccgccaaatcgcaggcatgacagatgatgaattaatggttgctgctaaaaacttcggtgctccatatgaattaatcaaagaaattaaaacacttggcaaacttccggtcgttaattttgccgctggtggcgttgcgactcccgctgatgctgcactaatgatggaacttggagcagacggtgttttcgttggatcaggtattttcaaatccgataaccctgccaaatttgccagtgcgattgttcaagccactacctactacacagactatgaattaatcggaaaactttccaaagagctaggttccccgatgaaaggaatcgaaatgtctcgccttaacccagaagacagaatgcaagatcggagtttttaatatgaaaaaaattggtgtccttgcaattcaaggtgcagtggatgaacatatccaaatgattgaatcagccggtgctcttgcttttaaagtaaaacattcaaatgatttagctgggcttgacggacttgttttgcctggtggggaaagcacaacgatgcgcaagattatgaaacgttatgatttaatggaaccagttaaagcatttgcaagtaaagggaaagctatttttggaacttgtgctgggcttgtccttttgtcaaaagaaattgaaggtggcgaagagagcctaggcttgattgaagctaccgcgatccgtaatggttttggtaggcagaaagagagttttgaagccgaattaaacgtcgaagcatttggtgaacctgcgtttgaagctatatttatccgcgcaccatacttaattgaaccgagtaatgaggtagctgtgttagcaacagttgaaaatcgaatcgtagcagctaaacaagctaatattttagttaccgcattccatcctgaacttactaacgacaatcgctggatgaattacttcctcgaaaaaatggtataaaaaaagcagtagacaatttagtctactgcttttgcatattatttattcactgcttgcgctgctgtaatcaacgttaagttataaacgtcatctgtattacaaccacgagataaatcattaactggtgcatttaagccttgtaaaattggtccaactgcttcaaagttacctaaacgttgggcaattttgtagccaatgtttcctgcttctaagcttgggaagataaatacatttgcgtcccctttgataacggatcctggtgcttttttctccgcaacagttggaacaaatgctgcgtcaaattggaattcaccatcaagcgttaattcaggtgctttttcttttgcaagagcagttgcttctacgactttttctgtttcatcggattttgcagaaccttttgtagagaaacttagcattgcaacacgtgggtcaatgccgaagatttctgctgtttccgcactaacaatcgcattttccgctaagtctgctgcaactggtgcaatattgatagctacatcactgaataagtagcgttcttcaccgcgaaccataatcatcgcgccggcaactttacttacgcctggttttgttttaataatttgtagtgctggacgtacagtgtcgccagtagagtgagccgcgccacttacaagaccttctgcttttcctgtgtatacaagcattgtgccgaaatagtttggatcaactagcattttacgcgcagcttcttctgttgctttacctttacgacgttctacaaatgcagccactaattcatcaaaaagtggatcggtcgcaggttcatgaatagcgattccttcaacagaaacaccaatttcttttgcttttgcttcaatctccgctttatttccaagtaagattggttttacgatattttctttttgcagacgtgcagctgctccaacaatacgttcatctgttccttcaggtagtacgatgcgcacgtttttcccagtaacttgtcctttgattgtagtaaataaatcactcatgtgttaattgcctccattaatatacatattatagttaccattttactataaaaaagaacaacttgacagaaaaaaagtgattaaaaacagctccagcacttatttccgtgtatcaatacagaggtaaaaaggcatgccacttaggcaaaagacggctatgctcttaagaaatttttttgctgttataccctactattttgctattctaacagcaatttcaaaaaaacacttcatattaaggtctgttcgtgataaaatgaacatagttgataatgattatcatgttcattacataacataaaaggaggcctgctagcttatgcaattaaatgaaactgctgtcggtgaaaaagttcgcatctcagaattaaaaattgagaacgccatgcttaaacgtcgcttacttgcacttggttgcgacgaaggttgtgatatttgtatcaaacaaaaaggactatttggtggtccctgtacttttgaaacaaaagggcaatatatcagcattagacaatgtgatgcttgcgccattatggtggaacgcagatgagtcaaaatacatattgcttactcggaaacccaaataccgggaaaacttccttatttaatgcattaacaggctcttatgaatatgtaggaaactggagcggagttaccgttgaaaagaaagtcggtacgttgcgctctaaaacaggaaaattaattgatttacctggaatttatgacttaaacccgatttctcgtgatgaaacagttgtcactagatttttattagaagaaaaatttgattgtatgttaaatattgtcgattcatcgcaaattgaacgaaatttaaatttaacgattcagctccttgagttcggcgcacctgttgtgatgggtcttaatatgattgacgttgccgctggtcgtggcattcatttaaacatccaaaacttagcaaaaaaactgcgcattccgattttgccagtcgtcgctcgttctgggaaaggtaccgatgatatattaactactttatcggaaaaacatgtggcaccggcgattccgcttgttttaccatacggagaacccgcggagaaagctatcgcagaaatccaagctttaactaaagatattatccctactaagcaatctcggtggctcgcagttcaatttctttctaaaaatgaagtcacagaagaatttttaacgactagccctatgtttgaacaattgaaagatatacgctcagatttagaaattgcgcttgccggcaaattagaaaatcactttcaccaagttcgcgtgaattacattcatgatatttgtttgacttcagtcgaatacacgcgcaattcggatattccactatccgataaactcgataaaattttcacgcataagtttttcgggattccgattttccttggtattatgtggttaattttccaaataacctttacttgggttggcgcaccgctgtccgatttgctcgatggttttatcggtggctcgctgacagattgggtgacttccttcttaacaaccatcggcgcatctggatttattactgatttggttgcagatggtatcatcgctggtgttggtggcgtgctcgtctttgttcctcaaatcttggttattttcttcttcatttctgtcttagaagattccggatacatggctagaattgcggttgttatggaccgcgtaatggaaattttcggcttaaatggaaaagcatttattcccatgattatcggttttggttgtaatgttcctggaattatggcagctcggtcgattgaagaatccaaagaacgtacattaaccattctcgtatcaccattcatgtcttgttctgcgcgccttcccgtatacgctcttttcgttggggtattttttgaaaaatatcaagcgcttgtcgttctatcactatacgtgattggtattttaatggcacttatcgtcactaaaattttatcaaaaactttacttaaaaaagataattccgtatttgtcgtcgaactaccgccctaccgcttgccatcgcttaaaactttatggcgtagcacatgggaaaaaggaaaaggattcttgcgtaaagcgggaacattcattttcgcaggttctgtgatcatttggttactaaactacgctggtccatcaggactcgacgtaccaatgggtgaaagtttcttagcaattatcggtggcatgctcgctccactactcgttccgctaggttttggaacttggcaagcgggagcgacacttattcctggttttctagcaaaagaagtggtagtttctacgatggcaattatttatgctgttggagaaagctccatgggaagtatcgttagcaccttttatacaccactttcggcttattgctttatgttgttcatcttgctttacatcccatgtttagcgacagttgccgccattcgtaaagaaactagttcttggaaatggaccgcatttgccgtcgcctatccactcattacagcctacgtattagtatttctcgtttatcaaatcggaagtctattcgtttaagaaaggatgtttttcgtgagtattatcgttaatttattacttggcggtgcaatttttggctacaccatctatgctattatcaaatttgtcaaacgtagtaaacagggaaaatgcggtggttgcgaacttgaaaaagcctgtaattgcgagtcagacgaacatacgaatttggatcatatatataaatagcaaaaaagagccctttccaaggctcttttttatttcaactccggttttatcgttaccgcaacaatttcatatggatttcctaacctcggaaatgctttttgatgaaggcttcccgcaccaagtcccgctgaaattatcattgtcttcccatttttcgaatgctctccgtatacatactccggcaaaatggtccgctgcggccctggagcaatcgcgccaatatttgtatatggtatacgcacaatcccaccatgcgtatgtccacttaaggttaaatcaaaatcattctccacataaagcttaaaataatccggcatatgcgacaatagaacttgataatactgcgagtcttgctgcgtttgtatctccgctaaacctttcttataataggaatagtcataatctaagttcgcactactccgcaatccagacatctgaaatttctgccctcccacgtcgatagtagccgttttatcttctaagttaaccacacccattttttctaaaaaaggcttgtagtcgtcttcataggcatttttaacatcatattcatggttcccaggcgaaaaataaaccggcgcaatcttcgtaagctttttaataagctctttaggaacactatccccttgcctatcaaaaagatctccagtaatcgcaatcacatctggatttaaattttccactttatgtaacaatttttcattcttatcgccaaattcactaaaatgcaaatccgataattgcacaagtttaatttctttttcaattttagtagaactgacttcatattttttcaccgtcaacctagtcccaagaaaccaccccacgactaaaagtacaatgataatactgatcgctataatccacttcatctttaaagacattttttcacctctatgttgctgttcccatttattatcaatattttgtcatcctttaaacgttatccctatcattataacctagattaagcgctgactcaaaatgcacgaaaaaatcaccccaagtctaataaaagaagaaaacggaaaaaacatcgggttgacataaacttgataaggtatataattaacttataaaaacttattaaaatataaaataaacttaaaataaattatctaaggtggcgaatattatgaaccaaaaagaaagaatagtggaggaactgaagctgctagaaaacatgaaaactatctctcaggaagaactcatgcagattttttccatttcaaaagatacagcaaggcgcgacattttaaaattagtcgaaagcggactcgcagaacgctatccaggcggagtgtcactaccagttttaaaacctcaaatagaaagctatacaagcagattagtgaaacaaagtgaacagaaacagaaaattgcttatgtggctggtaaagtgataaaagatcatatgactatctatttagatgtttcgaccactgttcattttttggcttcaggccttgagcaaaatgatttagtagtagtaactaattctatggacaatgccatagcggcatctcagaaagaagataacaaagtatacttgctcggtggtttcttcaacttccaatcgcgcgtattatcaggcgaacccgttttaggccaacttcaacaattcaacttcgatgttgcttttattggaggagctgggctaacagaagaaggtgtcttttattcagaacttacagatgtctatatgaaacaagagattatcagaaattctgaaaaagtatacctattagttgatagtacgaaagtgaataaaaagacagcattcaaaattgatttttctggaattgatgccgtaataacagatgaacccttgccaaaagatttaatgcagcaccttatttctaaagaagtagaagttatatctttgaaaggattgtgaaaataatggccgttatcaaaaatgtgaaaatttacaaagaaaatgaattaatcgatgcagtagttattacagaaggaaatttgataaaagaagtttgttcaactactcctgaaaagtattcagatgagccaacttttgatggaaatggacgattgctaattcccggaatgattgacgttcatattcatggggcaaaaaattatgatatgatggatggttcaacagaaagcattcaagctgtatctatggcttgtgcggaaacaggatgtactagttttttagtcacctcggttagttcttctttggaagacttaattcaaatgattagacaaacaaaaaaagtgataggaaaagagaaaggtgccaaaattgcaggaattcacttagaaggcccctaccttaatatcgaaaaaaagggcatgcaaaacccagcccatttaagacaccctgacctaaaagaaatgaaaaagattttcgatgaagcagatggtcttattaaaatggtaaccattgctccagagttgcccggaggtatcgaactcattgacttcttgaaaaaaagaggcgtagttgttgcaattgcccactccaatgcaacttatgaagaggcgcaagatgcctttgaaaaaggcgcatcgcatataactcattgctttaatgctatgccggcaatccatcatagggcaccagggcttgtagcagcggctttagaaaatgattcgataagtgtccaagccatcgtagacggggtccaccttcatcctgggattgtgcgtctcattcataaaattaaaggacccgataaaatggttctcacaaccgatgcccttcaagctatgggagttggcgacggcgagtatatttttggcggtcaccaagtaacggttacagaaggagtggcacgcttacaagacgggacattagcttcaagtaccgtgacgatgaataaatctttaagattaagtaatgaatttggtattaacttgcaagacactatacaaatggcaacaagtacacccgcagatattttaggcatgaaaaatttgggccgaattgaaaaaggttatagcgctgacttggttttacttgataaaaaattcgaggttctaagtacgtggattaacggtgaaaaatactaaattggctggatcaatattatcaaaggagtggattataacttatgccgttattcaaacacgaaggaattgattttaactatgaaatacaaggagaaggtatcccctttttgtttcttcatggactaggtgataatttaaaatttgcttttgaaacatttaataatgatgaaaaaatccaactaatttcattggatcaaagaggtcatgggaaaagcggacatgattccagaaaacttagctacgaaagattggcaagtgatgcattagcgttaatggattatttaggaatacagcgtttttatatcggaggattatctatgggggctggtgtggcagtgaatttggcagtccatgcggaaaataaagtgatgggacttatattacttaggagttctgcgacagatgagccgatgaaaaaagaagtgatagaatggtttagtaccgtaagtatgtatttacctaaaaaaaatggctcacagttatttgagcaagatccaatatttccatcgataaaagatacctatcctaaagcaattgatacttttaagcgatattttgaagatgacgcctctgttaattactataaaaaatttatcgacattcctagagatagaccaataaaatgcaaaagcgaattaactaatttaacgattcccacacttatacttgcaaataactatgatgtgattcacccgatagaatacagtttattttatgcacgtaatatgaaaaaggccagttattatgaactcacccctaagactgttgatgcagagaaacataaaatcgaaatagatacctatataaatacattcatcctaagcaactcaaaaaagtaatctacaattccatagaaataaaaaagcagcaatcttgtatatgccattgttggaaatggctttatacaaagatttctgcttatttgttattttacaggtggcgtagaaacaatcgctgtgatttggccagttatttcccaagatttcacttcatttggtaaaacgaaatgatccccttttttaatagcctgttcgtcgccatcaatcgtaagaaccgcttccccatctaaaatactcactaacgtgtaaggcgctttggctacgaattcagccttgccatccacatcccatttataaacgctaaagaagtcattcgaaacaaaagtcgtttctgtcaaaccgccacgagtttcagtatgaatatctaacttcgcatccacatgcggggcagtcgtaacgtcaatagctttatctaaatgaagttcgcgcaagtttccttctgcgtctttacgatcatagtcatatacacgataagtagtatcagagctttgttgtgtttcaagcactaacgtccccgtacctaacgcatgaattgtaccgcttggaacataataaaattcacctggtttaattgccactttacgaagcaatttatcccattcgccgttttttgcccaagtagcgaactcttctctgctagctgctttgtgaccatatattaattccgcaccaggagcacagtcaataatataccagcattccgttttgccaagttcgccgttttcatgtactttcgcatattcgtcatttggatgaacttgtacagaaaggtccgtattcgcatccaaaattttcgttaatagcgggaaaactgcttctttcggattaccaaaaagtgcaggattttcttgccataattcagctaatgttttgcctttatattcgccgtttttgattacggaaggaccattcggatgagcggaaatcgcccagtcttcccccgtagtattagacgggatatcgtaaccaaaataatcatgtaatttcgttccaccccaaattcggtcttgaaaaacagggtttaaaaataatgcttctgtcattataaaattacctccattccagcgtttttgctgggttttgtcaattaaaagtatatactaataatggcgaagatgctagttatttcccgcctaaaaaacctctttcttttatttgttcggttaaatttgggtaataaggtctgtcataaaatttggctaaccgttcggtataagaaacaaagccttctcgctctgaaaacggaataatctcttggtcatatgcttctagtaaaggcatgacatctgtttggtacgtctcttcaaaataaactgcttcttttggcaaacgaggttttacaggcgcttcgacatccggaacgccaatacaaagtccgacaaccggcatgacgaattctggtaaatttagaaatccagcggttgccgtaatatttctacgcaagccgccaatacaaatcgtcccgtaatcaagcgactcagcagctgttaaagcattttgcatacaaagcccgatgtctgttgccgcaaccattagtaaatcttcttccccagcaatttggaaacttttaccgtgcatgtcactcgcaacttttacacggtgaaaatctgccacaaaacaaagaaaaacagaacattctgctatgtaaggttgatttccgcaaagttcggccattttatttttacgttcttggtctttaatcgcaataatggaatagtgttgaccgttaatccacgacggggccgcttgagctgctcggataatcgcatctagtttttcttccggaatctcgaccccttttttatatttacgaaaagagcgatgatttcttagcaaagttaatacgtcattcatctttatgcctcctagatttatcatttagttaaagtatagcttgtttttaagcaattgttaatgttttctcttgtatttctgccagatattttctacacttaaagaaaaagaggtgaaaagatgtgcgccaacaacaaatagattttaaatggcttgaagaaaacttcctgactgcgaatgaagccgcgacttacttaggcatatctaagcaagcactcctttccttagcgaaacgcgatgtacttccctttacgaaaaaaggaaatatggttcttttccaccgaatggacattgaacttcggcttgaaaaacaacaaagcttgcgcgaaaaataccgtccatttgaaacatgaatttcacaaacagcgaaacggacgaactactttccatatgttacactttagttagtgatattctaaacaaggagtgatacataatgaatgaagcagtaaaaacgttagacggttggttttgtttacatgattttcgttcgattgattgggctgcatggcgtgaattaaatccaggtaatcaggaacttatgttaaatgaactaagccattttttaagcgatatggaaattactaaaaatatcggtgaaggagaacataccatttacagcattcttggtcaaaaagcagatttagtattcttcactttgcgtgattcccttgaagcgctaaatgaagtcgaaaatcgttttaataaattagcgattgccgattacttattaccaacttattcctatatatctgtggtggaactgagcaactatcttgcgtctcacatggctggcggtgacgatccttatcaaaataaaggtgttcgcgcgagactctatcctgcacttccgcctaaaaagcatatttgtttctacccaatgagtaaaaaaagggatggcgctgataattggtacatgcttccaatggaagaacgccaacaacttattcgcgaccacggcttgattggcagaagctatgctggcaaagtacaacaaatcattggtggctccattggatttgatgattatgaatggggcgtcactttgttctctgatgatgcactggagttcaaacgcatcgtaacggaaatgcgctttgatgaagcaagtgctcgttatgccgaatttggctctttctttattggaaacctgttactatccgagcaactttctaaattatttactatttaatataagtaaaaactggaattcaatctaacaaatgactgattttgttagctggattccagtttttttatttcactaaactaacaattttgtaaggatatctaccataaatgtcatttgatacgatggaacgagtcctatatacacgatagaatgatacatatactaaccgaatctagttttataaggagagaaaataatggagacagttttacaagcaaaaaatgtgagaaaaatatacggtagcaagggaaatgtctacactgcactagaaaatatcagtatcgatattaaagaaggtgaatttactggaattatgggaccatctggggctggtaaatccacgttactaaatgtcttatctactattgataaaccgacttctggtcagattgtgatttccggacaagaactcgaaaacatgaatgaacaacaaatgtccactttccgacgtgacaaactaggttttatattccaagattacaacttactagacacattaactatccgtgaaaatattatccttcctctcgcactagcgaaacgcccagtaaaagaaatggaagagaaattagcaattatcagtgaaaaattcggtattacagaaatccttgataaatatccaagcgagatttcaggtggtcaaaagcaacgtactgcagcttccagagcaattattacatccccaagtttaatttttgccgatgagccaaccggtgcacttgattctaaatcagctaccaatttacttgaaagcctacgtgacttaaatgaacaagataaatcaacgatcatgatggtaacacatgatgcttttgcagcaagtttctgtaaacgaattttatttattaaagacggagaattatacacagaaatctatcgtggaactaaaacgcgtaaggagttcttccaaaaaattctagacgtccttgcaaaactggggggcgactcagatgacgttatttgatttagctaagaaaaatattcgacataattttgtccattactttttatattttgcatctatgattttcagtattatgatttattttacattccttgttctttcgaaagatccatctgttgtagctagaattgaccaatcggctaaattatctactgcattttcaagctcatcagtcattctacttatttttgtagcgatttttatcctttattccaataatttctttacccgaaaaagaaaaaaagaaattggtctttattctttactcggccttcgtaaaaaagaaattggtcgcatgttgttttatgaaaattttattatgggacttggcgcattaatcatcggtattattgccggtacattactttccaagctttttgtaaccattttacttaacttaattaatcttgatagtattggtggttttgccttttcatgggcagcagtaatacaaacgagtattgtctttattatcatcacgttatttacatcgtttactggttaccgtattatttaccgcaccactttacttgatttattccactcagaatcaaaacgcgaaaaaagtccaaaaccttctttcatcttagcgttactttcgattttattaattggtttaggctattttatcgctggacaaccacttgattctaaaggctctatttgggcacaacttggcttttctattggggcactagttattttagcttcggtaatcattggtactgcacttttcattacctttttcttaccgtacctactaacaaaacttagaaataacaaacgtattttctataaaggtagtaatattatctcgacctcgcaattagcctttagaatatcatccaatgcgaaaaccttgatcattatttctattttaagtgcaacaaccctttctgctataggtacaataagcagtgtgtattatcaagcaaatacatccgcaagcacgtccgctccatctagctttgaatatgaaatacctaaagatagtgaaacaaacaataaaatcatcgaaactgcagaaagtgaccctgatcatccagtagagtttaaacaaaaaagcacttactatatcgttaaagcagagggagctcgtccagactttgtagaatacgatataaacgagggttttccagttatttccgaatctgattataattctctcgtaaaagaacaaggaacacctgaaaaagcagctagcctcaaaggaaacgaagcacaaatggtactaactattacttatgatgaggatgctcaaaaagaaatggttggtgaaaaattcacacttgcttcgccgaataaaccaaatattaagattaaatctgtcgttcaaaactcaccaataagtactattccaggcttactcgtacttccagacagccaagtagctaagatagcagcagattcttcaattgctgctcacagtgtcgaatccatttcagttaaagatgcgaaacaagcacaagcattagataagaagatgcgtgctgttattccaaaagatacgaatttcatttcttatactaagatgtaccaagaaattattactgtcactggagttcttctctttatcggtatgttcattggttttgtgttcttagcagcaacaggaagcattatctacttcaagcagctaacagaagcgtataacgatattggtacttttgatatcttgaaaaaaattggtcttacacgtagagacattcgtaaagtccttgctaaacagctattagttgtattcttaattccgctaatcattggtatcgcccatagtagttttgcacttctcggactttcacatatgttagcacttgatttaactttgccagttgttatttctactggagtttatacattaatgtatattgtttactattttgttaccttaaatagttacacaaatatcgttttcggcaaaaaataataaaaagaagccctctaaccttaattagagggcttctttttattattttttcgcaatatacccaaagatactagatagaaaagcagaagctcccatgaggaactgcataccaaacacttctcgttcattactaccaaatgtaatagataaattttctttagcaaaatcaatccaatttgtcacggataaataatttgtcagtaaaataaaagctgcacccattaaaataccaactaatagatacgaaactttacgccaagaaaagattaccactagaagaaatatgacagccataaagcatgcaaaatatccatctaatgctgttgtaaataaataaccttctttaatattgtccgaatgtaattgtctaaaaatagttactgcagcaaaaaccgatgtcactgcaccaagaagcgagaaaacacctgcagcataacgccatttcgttttccacgcttgatctgcttgtatttcttttgcttgaaatattggtccaataagtaatgcaattaatactaaaagtcccaaaatacataataaagttcctgaccattcaaacggctgtgtgtactctaattttgaaagaactcggagctgataataatataccgaaaatccttggaataaaacgaaacacataacgccaataatacttgcaaggcgaaaactttcttttctcataaaggcaaaaccaataataaaaagtcctacaccaaaaaataataacatccaataattccatacaaagacaaaactattttcttctgcattaaaataaccaataaccgcactaataaaactatataattgcgtaataccaagagcgattagcaaactaccgcatattcctctccatttactaggcaattcgcccacttccttcctatttatgccttgccatgttaccctaagagtgaggtgataaaaatgaactggaccatttgggataaaagtcaaaaagtcccgtacactctgcttttagaggccgatcctagtgaaaaacaaattgcaaaatacttggataaatcccatgtttttcaattaatgcacgatgatattgttatcggcatcatttgtctattcccactaaataatgaccaactcgaaataatgaatattgctgtttcttcagattacagaaatcaaggtattggtaaaaaactactcgaaaaagcttttgattatgcaattcataaacactttataaaaatcatcgttaaaactggaaattctagtattgaccaacttgccttttatcaaaaaaatggttttcggatgcagcatattattccaaattattttactgaaaattatcctaatcaaacaattaccgaaaacggcattgtttgcttagatcaaatcattctattaaaagaaataaaatcctgatgaaatttatcatcaggattttttgtttgttgttttaatcgttaagtgccatttctgaacgaacaaccgctgaaatacgttcacaatattcgtctgtttcttctttcgtagcagcttctaccatcactctcactaatggttctgtaccagatgggcgaacaagaactcgaccattaccagccatttcagcttctacttcatcgattactttacttactttcggattatccgttacatggtttttatcacttacacgaatattttctaatttttgcgggaatgttttcatttcagccgcaagctcagataattttttcccagttgctttcatcacgttgattaattggattcctgaaagaagtccatcaccagttgtattatgatctaagaaaataatgtggccagattgttctccgccaagattataattaccttcacgcatagcttcaactacataacggtcaccaacagcagtttgtacatcttcaatttcaagctctttcaagcctttgtagaaacctagattactcatgacagtggatacaatcgtgttgttatttaataagccttgttcacgtaaatatttcgcgcaaataaacataattttatctccatcgacaatttgaccaatttcgtcaatcgcaataacacggtcgccgtcgccatcaaaagctaaaccaacatctgcttttttatctaaaacaaaggccgctagtgcttctggatgtgtagatccaacgccatcattgatatttaaaccgtttggagaagctcccatcgaactaatatccgcatctaaatctgcaaataaatgcgttgcaagacctgaagttgcaccattcgcacaatcaagtgcaatgtgatagccattaaaatcattttcgattgtttgttttaagtattgaatatatttttgtttaccttcaaaataatcgctaaccgtcccaagcccttcaccacttggtcgaggtagcgtatcttctgctgtatcaagaagttgttcaatttcttcttcctgatcatcggacaatttaaagccatcagaaccaaaaaatttaataccgttatcatctactggattatggctggcggagatcattacgctggcagaagcgccttgtgcttttgttaaataagctacacctggtgtggagataactcctagacgcattacttcaatccctacagaaacaagtcctgcaattaaagcggattcaagcatttctccagatatacgtgtatcccgagctacaagtacacgtggatgttcccctacatgacgggttaaaacatacccacccattctacctaatctgaatgcaagttctggtgttaattcagagtttgcaacacctctaactccatccgtaccgaaatatttacccatttcattactctccttctaagtcattcattatctaaatgatttttgtttgtcatttcatcattactttgtcaaatactggttctatctttactaatctcaaccatacatttgttattataccttttttaagagaaaatttcatctctctgcaataaaacgttggtattacttgctttttcactattctatgtataaaaagttctttgccaaaaaggaggagtatgagactagcgccccacactccttattttatgtgcttttggaaggtacttcaatggatgcctctttatccgtaataatgaaatcagcttgtctagggttaataacataggcaacattgtccggtaagccattcaattctagtggaatactgtaacttcctgctttgcttttactcagattggcaatcacactcaagtctttcgccgcaattccgtctactgttttcttctctccagttatcgtcacagatacttttccatttgcaggagttatcatttgtgcatcaaaagtatttttcaacccactcatgtacacttgcatattagaaaacgacttggatatttttgtattgttatctcctgaatcatcagtgttgttatccgttgtatctgtgtcttggttattactatctgaggttgttggattgttatttgcttcagacttttttacggtcttaatcttcacctctatcgtcgttggttggactgatttggctccagttggaactgggacagtcacttctttgacggtatctgctttgattttagaaacatcaattggaatttcaatttctttaattttttcaaggaccgcatcatcaccgacaactaccacttctgacttatcgggagtcatgctagaaatttcaatatcactttccggcgtgccttcttgcttaattttcactggaactgacttgccgactttttcaactggcacggtcacttccacttcttgcggatttacttctacatctagcttgttcaaattgctatcaaaaacagagacggtggccttatcggtaaattcggatttatgtttgccatcactttcgagtgttgcttttacataagcaatttgttcgatagtatcttttgcaccagtaatagagacttttttaggatcaatgattggtgttccagcttgataaccatctgcaacgactgatttgctcaattctacatcaacagagaattttttcgttactttttcttgtacatttacgttgactgttgctggattcacttttacttttaggcggtcagatacatctttcacttgtagttttacttcttgcgtgccaatggaggcatttttcaaatctgcgtatacggtaaagtcttgttgagctttagcagattgaacgatgcttcgaggccctgaaagcgttacagtaacggtttctggaatacccgaaatatataaattcgttttatcataatatactttgactgggacattctcgatgacttctgaatcactagaagacgtcgtagaaaaagtcgtggcgttattattatttgcattaactgatgtaaaaaggatggctgcgagtagtaaggctataattcgaatcgaccatttattatttaaaattcgatccatcattcgcttttgcctcctttccatttagaaaagatagaaggtttctttgcagttactgtgactagttctttaagaagaattttatgtaactcttcttcagacacatcacggaaaagttctccacctttagttagggaaattccgccagtctcttcagaaactacaatcgtaatactatctgtcacttcactaatcccaagtgcagcccggtgacgcgttccaagttctttggataagaacgggctatctgaaagtggcaagtaacttgctgccgatgcaatttcgtttcctttaataataactgctccatcatgaagcggtgtattcggaataaaaatattaattaataattgagaagaaatttttgcatttaacggaatacctgtttcaatataatcgtccatgcctgtatcgcgtgccactgaaatcagtgccccaattcgacgttttgccatatattgggtggatttttcgatagactcgattaaatgatgctgttcacgctcaattcttgatccataacgagtaaaaatattacctcgtccaagcgtttctaaagcacggcgtaattccggttggaagataattataattgcaaggaatccccaagtaagcatctgatccgtaatccattctactgtttggagaccaaaaaatccgcttaatagtttgactgcaatgataataaaaatgccttttagtaattgtactgcttttgtacctcggattaacatgatcactttataaattacaaaccatacgacaagaatatctacaatatttgctagataatgcaatatcgacatattggaaaaatccatcacttcacctccgtgcctcttgaaaaccatttataatcacatggttcactttctttattatagcataagagtgcaggtggaaaaagcaatcgtcacgccaaaaattggaaagatttgttaaagaaaaaacttgttggaaacatgtgttatcgtttccaacaagtactattgtccttatatttctactattaccgctgtttctagcaaataatttttcttatacatttctaaattaatagcttctccatggcataattttacagttacttgtccaacttccactttcacttctaacaaacgatcacggaagttaattttgaatcggtaattatcccaaccatttggtaagaatggtgcaaagcttaacttaccagatgttactcgcataccagcaaagccttgaacgatggataaccagcttcctgccatagaggtaatgtgcagtccgtcttctgtatcgttgttaatattgtcaagatctagtcttgcagttcgcttgtaaagttctactgctttatcatatttaccaagttctgaagctaacaccgcgtgaacagctggtgataagctagattcgtgtactgttagtggctcataaaattcaaagttgcgttgtttcgtatcaaagtcaaagtcatcatagaataaatataaaccttgaagtacatcggcttgtttaatgaagcaagaacgtaaaattttatcccaagaccaattttggttaattggcatatcttctggttttaatgtatccgtggaacgcaattctttatctaaaaaagtatcgtgttgcacaaaaatctgccatttttcatcaaaaggataatacatgcgatgctcgatatcttcccattttgcgatttcgtactcggtcacgcctaaacgttttttcgcttctgcatctaaattctctagcgtataacgaatcgtccaagcggcaatatagtttgtataccagttattgctgacgttattatcgtattcgtttggtcctgttacaccgtgaatcatgtatttatctaaacggtcagataaatgcacacggtcggcccaaaaacgagtgatttcggttaatacttcgattccatctgtttttaaatacgaatcatcgccagtgtagtttgtataattataaatcgcataagcaattgcgccattacggtgaatttcttcaaatgtaatttcccattcattatgacactcgactccggtaaaagttaccatcggatacagtgcgccatctaggccgattttctgcgcgttaattttcgctccatccaattgatcatggcgatatttgagtaaattatggcttacagatttgtccgtcagcgataaatacattggtagtgcaaatgcttctgtatcccagtatgtcgcaccgccatatttttcaccagtaaatcctttagggccaatatttagtctggcatcttcgccgtaataagtcgcaaataattggaaaatgttaaagcggattccttgttgagcggaatcatctccagaaacttccacatctgctttgtcccagcgttcgcgccagcccgcaacatgcgctgttaatagttcttcgtatgtttttatttctaagctttgtaagattttttctccagccggaagaatgtcctcttcctcaaaatcacgagatgttgtaatgactacacgtttttcgattttagctacttcattttcttgcaaatcgaattgaaaatgattttcggtataaagagcttttgtttggtttgtttcgtttgccgcattggtcttattttccatcaccgcagaaacagtaaaacgtggcgttccgaagttatttggaatagtttttgttacaagtgaaccacgacttgctgatgaagctttttcgacttcttgccagaacatttcttcatagttggcatcttcgttttgcacattaccatctaaaaaggacgttaattccacttttgcggagcttaatgcttccacttggtagtgaataaccgcaagttctttcgttgcaacactaaggaatcgttccgcagaaatccggaatgttttattatttttaactaccgtgaattgtcgtcttaaaacgcctttttccatatctaattctagttcaaaatcgcttacttcatctacaaataaatcgagtttttcaccatcaagacgtacttcaattccgataaagttaaggccgttaatgactttaccgaaataatctgggtagccatttttccaccagccaactcttgttttatctggaaaccacacgcctgcataataagttccaatatggccgtcgccggaatatccttcttcaaaattcccgcgcatccccatgtaaccattaccgagtgaagttaggctttcttgcaaacgtttattttctttatctagtttggttgtccgtaatgtccatggttcgatttcaaataattgcttctgtgccatactaaaacctcctaattagcgactagcagccatacttttttcactagtcttataaaatcttgttttcaaaaatgtccatgctatcattaacaccattccgagcgactgaacagccataataatcgtaatatcaaagtagataaagccgataatacatgccgcaatcaccggaattcccagtgcatttagcgttaaatttactgattctttaaaagaagcaatgcttgaaaaactgctccgttttgtcatccaaatgaaaagtgtcgtaaatacggttaacatgagtgagctaacgaaaataatagaaccaatcatcagcaccatcgataggaaaacaaatgcttggttttccaaataccactgcgccgacacccaatcaacgagcgactcgcctgacgttatttcgcttaaggtagcatcttttggatagcttacttcaaaattgtaaccactcgcatctgtaagcgtcatttcttggtctttgaaattaattacattcttcgctccactaagttctgctttcgttaaattcacaccagcaacaccattcactgttttttcaacgatgtgcgcatttttatcggttaacgccccgttttcgagcgtcagcccactaatttttgacgccaattgatccgtgcccagcgtcgccatttttggcattaaacttggtaaatcaaagcttgactgattggcaaagtgcgcggaaacaggaagcaataggagcgcatttaagaaaataaacacgatgaccatttgccagaatttcagtactttccgaccttcgaaaatcgctgttggtccaagcgtgctttttacatattgaatgataaacggaatttttttcattggtatcacagcctttttaaaaatcaattatccttttgttccaccggcagttaagccagaaacaaaattcttttgtaagaagaagaacagtaaacaaattggtagcgcggctaaaatggcacccgctgcgaataaggctactttttgttgttgtgggttggcgataaacgtttgaagtcctaccgcaatcgttaagttttctggggttctaagtaggaatttcgcaagtaggaagtccccaaacggtcccataaacgcccataaagcttgaaccgcaatcatcggtctaacaagtggcaagatgatttgagcgaaaatccggaaatgtcctgcgccatcaagtttggcggattcatccagatcacgcggcacagtatcaaagtaccctttcatcagccatgtgttcattggaatcccaccaccgatgtaaatcaatgttaagaaccaatattgatcaagtgcacctagtagcattgctaacacgtagaaagctgttagggctgccattgttggcaccatttgaataataaggaagaaaattaagctatttttacgacctttaaaacggtaacggctatatgtataaccggcaagtgtcacaatcgttacttgcataatcatcgttacaaccgcgataatcagtgtatttttgtaccaatcaagatataacgtttcattaaataatcttgtaaagttattcagcgtccagctatccgaccactcaagcgtaaacgccgcgatattccctggtttgaaggcagaagatgcagttattagaatcggatacaaaataataatcgttagcacggttaaaaacaaatacgtgaaaaactgtgttaaaaactttgttgtccgctgatctttcataaagtctctcatttacatcatctcctcgttcccaaaggcatttgtcttcttaaaggcaatcatcgaaactgtaataacgataatggagataagaagcgtcacagcagcggctacagcgtattgtggcgaagtacctgttgttaatttataaatccatgaaattaagatatcggttgatcctgcgcctgctccgacacttccgggaccaccttcattgaataagtatattatcgaaaagttattgaagttaaatgtatattgcgtaataaataccggtgcggttacaaataaaatcatcggtaatgtaattttgcggaaacgttgaatcgcacttgctccatcaattctagctgcttcgtatagttcaccaggaatcgcttgaagcaccccagtaaccataacgtaaatatacggaaaaccaagccaaccttgaatactaatcagcgctacttttgtccagaaaggatctgttttccaagcaatcgcattgatatcaatgaacggaagatggtttaatagcgggataacttgtgaattaatcgccccgatactatcgttaaacatattagaaaaactcataatcgtaataaaagctggtaccgcccaaggaagtaagaaaactactccaaaaagacgtttccctttaataaagctttggttggcaacaatcgctgtaaataccccaacgacaatttgtaaagaagtcgcacagatcgtccaaatcagtgtccacgagaatacgctgaggaacgtgtcccgatacgaacttaggaagaaaatattaaagaagttcttaaacccaacccagtcaattaagttcgctggcggaatatggtaaaaatcatagttcgtaaatgccatgaaaagcgttacaagaactgggaaaataatcacaaaagtcatcactaggtaagcgggtagtgtaagtaaatacgggaaacctttgtcgagcatattttttataatagcaagagcggaacggttaacagtttcacctaggttccactgcatagccacgcgtcttgcatcgaaaatatttataaaccaaaagcctataaatagtaatgtcacaattaattgtaaagtaccttcaatcattaaaaataaggaatggtctacacctggcacagatccaagtgttacaaggccaatcagtgcattcagcccaactgcaaaaaattctatgataaacaaagcaaatagtgcgaaaaagacaatccctttaaaattttgcttattataaaattgaccaagtcccggaatgattgataacaaagtcgcttgacgaacatttttaatttgtttttgttctagtttcattttgttaccctcaattctagatatagattcactagctaagttaaaaaaatggcggggcgcgctacctttgccccgccaattccctattatttagtatatttttgcgttacattgtcttcaattacttttactgcatcatccgctgattgttgcggtgttttcgaaccagaagctgcatcaaacattaagttttcggcacctgtccaaacttccgacatttctggaatattaggcattggttgcgcatttttgtattgttcgataacagcattagttaactcatcatttttcgatttcgctgtatcacgagcttttaagttagccggtacttcatttgtcatatcatataaagtttcttggtttttttggttagttacataatccaaccatttttgagctacatctttatttttagaatagttacttacaacccaacctttaccgcctgcaaaaggagaatactctttgccattgttaagtgtcgggatttttgctacgccgtaattaatttttgcttctttgtaatttgctgctgaccatggaccgcctagaatagctgctgctttacctttaacaaattgatcttggataaagtcatctgcactcttattgtcttgcataccttttggccatacatcttggaaccattttgttgcataagtaattccttcaaccgaacctttattgtttaaaccgatgtcttttggatttgtaccttcatcgccgaatacataaccaccgtatcctgcaagtagtccgtaagagaagtagaaatcagtccattttgctaagaaaccagtattttttcctttttcagaagtgaaggcaaaacgagaatctttggaaagtgtttctaaatctttaaatgttgctggagctttgtcgagtaaatctttattatagtaaagtactagagtttcaataatagctggagcaccataaattttatcgtcaattgttacttgtttttggtctttttcatcgtaatcatctttatttcctagttttacttctgccaaatgcccttgctgacctaggcttccgattctatcaaatgcggacatcattacgtctggagcagttccagcaggcccgtcaagcggaagagcttctaatgtttcaaacatatctttttcgacaacttttacttttacgtcattatctttttcaaaatcaccttttattttgttcacgtagtctttgtagcctgcgtcaacggaaacagttaatgttttttcatcagatgagcccgatttgctagtatcttttccgccaccacatgctgccaagcttaaagccattactaaaaccgccgaaactattcccacttttttgaaacgcttcatttacttttcctcctctttatgaaaaaagtcgctctttactgtctgatttataagtccctttcttttttcaattcttttttaaagtttgtgaattaggttaacctatgcatttattatatgctgatttcgaaagcgtttacaaggagatttcacatgttaccgataacaacatttttccggtaaacatgtgaaaaattcctttgcgctattgatttagctgttttctttaataacaagaaatccttttgccgggatagttagattatcagatacagcttggttattccaaatatctatcgcggtattagcaaatgaaattgtgaaatcctgatcttttttcgtttgattgaaaaggaaatgtagtttttcaccatttaattctttagaaaatgcagtaatgcccgtttcgctgcttgcctctaaccaagttaactcaccggatgtgataatagcttgattatcttttcttagagcgattagttgttttgtaaatgctagcatatcttgattttgttttgcttcgtcccattccatacacttacggcaacctgggtcatttccgccgtccatgccgatttctgttccataataaatacacggcgaaccagtgtgcgcgaacatgaaggcaagcgcttgtttcactttatcctcatcgttattagcacgtgttaaaatacgcgctgtatcatggctatcaagcatgttaaacatcacttcattcacttgatttgggtagcgcatatattgttcattaatgccagaaaccatttgctctggggtaattttttcttcaataaagttctcaataatcgtttgtgtaaatggataattcattacggcgtggaattcatctccaagtagccaaatccatgaatcatgccaaatttcaccaagaatataaatgtcttctttttccgcttgagccgccttcttaaactctttccaaaaagcgtgatccacttcattagcaacgtctaaacgccaaccgtcaatatcaaactcacgaatccagtaagtcgcaatatccagtaaatacttctgaacttctgggttagccgtatttaattttggcatatgcgttgtgaaagcaaatgtatcataagaaagtgttggttctccttcgatattgccattttcattttgacgaactgggaaactatgaatatggaaccagtcgcgatacgctgatttttcttctttttcaacaacatcttgccactctggagaagtatccccaatatgattgaacaccgcatctagcataatgcgaataccacgtttatgcgcttctttaactaattttctaaaagtttccttgtctccaaagtgcggatcaatttttttataatcaattgtgtcgtatttgtggttggtcggtgcttcaaaaacaggcgttaaataaaccccattgataccaagctctgctaaataatctaagtgctcgataatcccttcaatatctccaccaaaaaagtctgttgtattcggatctttactcccccacggcaaggtattttccggagaaatagctggattaccattcgcaaaacgttctgggaaaatttggtaccaaatggtatttctaacccattcaggtgcctcaaatgtatctactgcatggataaacggaaatttaaagtaataatccatcgtagctaaattcgcctcggtcggctcaaaaaaaccacgtccgccataaaatgttgtttctccttcagtatcggttaataaaaatccatattgaaggcgtctatgttctggtgtaattgcaaaaaaccaataatcatgctcttctgtttctgcgattttgcgcattgtatacgattcactttgccattttccatctttccataagtaagggtcggcagcaattagagtaaccttgctaatatccaagcgtttagttctaatccgaatatgtagtgttttagcgtcataactatatgcatagctactcgccggttgatggtaaatccctgctttttccattttctctcctcctatatcacctatcgttctatttcaaattagcatttccattaaagcgtttgcaaccttttctcgctcgttaacggtaacaagattttttaactatttaacattctttcaacatattatagaagaaagcctattctctcttctcctttaaagtgacaaattagtaactttactgatttaaagtaaagagctataataactcatggactaatgaaatctttcgaaaaaaggtctaaaaggaggataaaatggaaaatactttaagctttaaaaaacaagggtattggttattttccagcgcaatcattattggtgttctttttcttcttttgccacacatcatttccaatattggagtgttagaatttataggtgctttttttaatgccctatgtatgggggttattgcttttatcatactaaaggcagaattccttgattggtttaaacattttagtttcaaatggataattattggtgctcctgcattaattattatcagctctattttcaacattgcgtgggcttacttcgcaggcagtactactgaaaacggcatcaacagtgttcttacatggacctacgtttttaccagtattccatttatgttacttggcgaagaattgctatcaattagcttactatacgccgcttggaaaaaatggaactggaaattctggcaagcttccttgctctgctctttactatttgcgacgtggcatctgacttcctatgattttaatttcttacaatgtatcattacattagcaccagctagactcattttgaactacttatttaagaaaacaaactcggtttgggttactttcatcgttcacttcatttttgatttcattgcatttttgccaattttactcaaataaaaaaacgctaggaatacagattcctagcgtttttattactcttcttttccagttgtagaggctcttatcagtaattcaggagtaaataataggtttccttgaggttttccatgatcattaattttcgcaagtaacatcttcgcgagttcttcccccatctcgacgaccggagaacgaacagttgtaatttttggcgatgaaatcctatctaagaaaaccccatcaaaccctgttacagcaatgttttcgccaaatcgacgaccaaaagcagcggcggcacgaacaacccctatggcaattcgatctgatgcgcaaacaatcgcaattttttccgagttataacgtagtaattcaaatgctttttcttccgcgatactggaactattcgcaataaaatagctctccggttccaaaccatgttctttcactacttcttcataaccttctaggcgcgatttcataaactgttcatctaataaattaattcccaaaaagacgattcgcgaaaaaccgatctctaccatatgctctgttgcgagcgcagttccttttttattatctacatcaatagaatcatagccacgtttattttcaccataaaaaataactggtttatcaatatctaaaagtcctaaatcataatctttgtcgcgtatccccgtaacaataagcccgtcataagctccgatatttctggacctttgtgtaacgagttgcaaagaataataatacttatctaactcacgactaatcccggtcagtaagttcatgtaatatggttcaactgtatcaatttcttctaaaatcaaaaactttatgacttgtgtcctattttgaacaagcgccctagcagcataatttggtacatactctaaggcttccattgcactataaacaagcattttcagttcatctgagacttgatctggatgattaataacccgtgaaactgtcattttggagacatttgcccgtttcgcaacatctgctaaagtcgccatctccaacctcctccattcataatcttccttattgtaccatcttttacgcaaaaaaaaataagaattaatccacaaaaaaagcattctctctaaaagtccgaaaatgctttgtttattatgattatgtaatgagtcattttatagtgtttgccactttttttgagagactctgcgttccttcgtttgttgataagttttgataaccaatctaattaactgatgagcaccgccaatagtaattccaatagcgatagcaacaagcgtagttgtcagaaaactaataaatggaaaactagatgcattcattgcagcaattcctaatataaaaataataatagtaggtagtacataatacctaatgtcctgctcctgcattccaagcgcccctttaccaaaataataactcccatcaactactgaaattataacgcgaaaactggcttttttcaaggcttggatggatttccatgctcctctttaaaaacgttaaatggctctatatagcgctttctatagacacgcaaaatccactcattatgaattcatcaaaaagaaaaatttgttaccactttgtaacattacttaagtccatttacttatataatgtaatacttatatttattcaattttatagataagtattaattcttatttccattttttcaagttttattgcctatctttttatagcatatacaaaaaaagtgtgctcttttttctatccatacattatttttaaaattgtgtaaaaaacttgattcgagcagtttttttaattttctaggaaaacttggcatttaaaatgcctttttcatctaaaggaaatttagtttttcgatgaatattcttctttgaaatcaaaatttccactttttacaaataaataaacaaccgttatgattacatcgttccattataaaaacggaagagctccccctcttcccccgaaggtctcttccgttttttctcttgttattcttttaaatgataaggatatgtggaaactactacatcccttttcattagaagtcttgtgcgaatcaatagacttgtttgattatgaaggacattttgccaaccttttctagggatgaattgcggtattaaaaccgtgagcgaataattgtcttgatctgctttttgtttagctgtatcaataaatttcattaatggatctgagatagatcgatacggagaaaacagattagccatacgcacttcaggatgcaccctattccatctctctacaaattctttttcctgttttttatcaatagaaatatgaacagcaatgactgtatcaccaatagacttagcatattgtaatgcaccctctacaactttggtggtatcagacacacaaataatgacggcattccctttaaagtccggcaagtccattgtttcgtcaattctaagttgtggtccaactttccggtaatgatgtcttgtacgatggaaaacataaatcataattggcataaagacaaatactggccaaacagattcaattcgagttaagaataatactaataatactgtaaatgaaattgatgctccaagtaaattagccgataatgattttttccaacctttagggcgctgtttccaccattttactatcatccccgtttgagacaacgtaaacggtatgaacactccgacagagtataatggaatcagtagttccgttttccctttaaacaaaataattagtaggatagaacccaccgctaaagtaataattccattagagtagccaagtctatctcctcttgctaaatacattcttggcatgaatttatcttttgccaagttaaatgctaacatcgggaatgcagaaaatccggtattagctgctaaaaccaaaataagtgccgtagtggcttgaataaaataaaacatgaagtttctgccaaatacattttcagcaatttgagaaagcaccgttacctttagctccggaacagttccataaacaaaagcaagtactgttattcctacaaagaagaaaccaagcaagcctgccattaatgttaatgtttttgcggcattttttggtcgtggctctttaaataaaggaacagcatttgagatagcttcgataccagttaaagaagctgacccagatgcaaatgctcttagtaaaagaaaaatggttacaccctgtacgtgagtccctactgcagctgtttcatgacttgcatccataccagttaatactttaaataaacctgtaaatataagagctataatagaaaaaacaaataaatatactggtattgcaagtaaactagctgattcagtaattcctctcagattgataatcgttactccaatgacaagaactacagctataggcactgcaaacggatataatgatggaacagcagaaacgatcgcatctgtcccagaggatacacttacagcaactgtaagcatataatctactagtaaagatccacctgcgattaaaccggcattattccccaaattctctcttgaaacaatataagctcccccaccatgcggatatgagtatataatttgtttgtaagatagattaagagcaaacaaaagaacaagtacacaaagcgcaattggtaatgaataccacatagcggcagcactaacagttacaagtaccaataagatctgttctgtaccatacgcaatagaagaaagtgcatctgatgacagaactgctaaagcttttaatttccccagtttttggtctccagcttctgatgttttcagagggcggccgattaatagtctttttagcggcgaagccattgtattccctaccttttttatttgatttttaactaacttcaagttgaccagacacattatagcacagctgattttagattgtaatactaatttgtattattttagctgagtaattacttttcaagtgaataattgttcataatgcttgttttcatgtctttaaaaagtggaagtttatttcacacgcctttcaatatacatacccattaataagataaataacccgttttccaaacttatattttcagaaaaaaaagaatttaatttgggtatttacaaatgacatcttttttttatataatagtttctagcggtaaaaaacttttatcatacggcccgttggtcaagcggttaagacaccgccctttcacggcggtaacacgggttcgaatcccgtacgggtcactttttaatcaaaaataataacttcaaaaatatttttcactttttttgaaaaaaagctggtaaaattgattaaaatgttatatcatgtattagtatctgttttgaagaattaattatgcaagagatttcgatttgccagcagtgagagcgattcttcgccgacttagctcaatctggtagagcaactgaatcgtaatcagtaggttgcgggttcaattcctgcagtcggcattttatagcggaggggtagcgaagtggctaaacgcggcggactgtaaatccgctccttcgggttcggtggttcgaatccactcccctccaccattttctattattgggctatagccaagcggtaaggcaacggattttgattccgtcatgcgctggttcgaatccagctagcccagtcatatttagagccgttagctcagttggtagagcatctgacttttaatcagagggtcgctggttcgaacccagcacggctcatcctttatgaaacaagcgaagaaaatactttgcttgtttttttatggtgtgaattattttttccctataaaaaaagataaactataaattaaatagtttatcttttactcaagtataattaaatcgtagttacttctggttctatttttccatatttatccaacaaaacaaaagacttagaattttctgctaaaaaacctgcttcaaccaattttctacaaagatgagtgactgaacgtaccgataggttagaataattagcaataattttctttgtgaaacattttggaatgcgtagcacaccttccttttcatttccaaaatatcttcccagctgctctagagactctttcaaacgattttctccattaccacgcattaaattacatttttcaattaaaacattttcgtgatttcgattattaagatataaatagagccacccctcttgcatcccaataatcgagcaaattatatcttctttatcaaattcgtatgctgtaattgtttcgataactctagcagtgtataggtttgcttctgccataaaataatcattcaatccagcaatttggtttgatcctaaaaaacttataacatttttattcttctctaatgaaactatccctttttcaataaaataaacctttgtatttattgtatcttctgttagtaaaatcatgttgcttggtattcttgtttttttataagggattctgttatcaattaaagtttgcaagaagcatgtataaccaaattcttcttccaaaatttttttactatacaaatcttcaaatacggattgcatttattgtcatctcatttctattttgtgttgttagcaaatagttttataatgcaatgagtggcttcttacaagtgatgatactaccaaacacttttaaaaggaacccaacaaaaaaacaaaacttcctgctttaaccaactatttttgacttttttgtcacaattgaattttattcactttataaattattgtataagtttcttttgatacttctattataagacgaagcacatttcatctacttttctaccaaaaaatttcatataatagtttagtaaaaacagtaccttcctaactacctttttagaagaataacctctattttttagtgattatcgctatattttgtattatttgtgaaagttattaattcgtgcttttattcttcctcgcttatgtttacgcagaaatgttctgctagaagaataagttttatgcgcttatattgcgggaaactaatggcataggggggattggtatgtatttaaaagaaacgttagatcaatttgcttcgatagataatattcttaaactgctcaagaaaaatccgagttttaataagcactgtattcaagagcggctcccacaaaaaacaatcatcacatccaataaacaacgaaaacatatctatataatagaagaaggttttatgaaactaatatttgatgacaacaaaccgcgtgatttttcttatattttgtctaaaggagcgtttccctttttgccagtttatatagaggatatacctgaacacacaatgatggttgctcttacagatattgtatggtggaaaatcgatattggtttctttaagagcatgatggagattgaagatccgcgaaattatctcatgctccatcaattagcggaaactagaagaagattttacactatcgcttatcaagaaaagttgacttcacgtgaaagtatttattactctttaagtacactaattgaatttggcttacgtatctctgaaaaagtagtagaacttccagaatttttaacctatcaaatacttgcggatcatgctaatacttctaaaagctacacgtctaaagttctaggccatttacgtgaagatggcattttggaatcacaaaaaaagccttggcgcattaacgatgtccagaagcttcaaaaattaatagagatgaatgtaccacttgtaaagatacaaaaaaaactaagagccgacttgcactcttagtttttttatttagattagttcacttcgccaagctgtagtttttgcttgttggtatttttctacttgaccaatagactcaaaaagtcccatcttatacttcaccacttctttcgccgcatcaatacagtctgggtagattgcgtttgcatcccaaagttctgttgtacttagaatttcacgacatttcttataaaaggcgtatttgtaatcgctggaaatatttactttttgaattccaatttcgacagccgcagcaatttctgcatctggatttgcagaaccaccgtgaagtacaagcggaatattcactaaagcttttatttcttttaagatatctagccgtaattttggctctttatctttaggataaatcccgtgtgctgtcccaatcgcaacagctagcgtatctacccccgtacggctgatatattcttctgcttcttcgggttttgtatagataatctcactgacgccgccttcaatactgttaccagttttcccgatagtcccgagctctccttcaactgaaacccccagtttatgacagacatctacaacctcctttgtaactcgaatattttcttcaaaaggaagtaaagagccatcaatcatcactgaactaaaaccacaacgcaccgctcgcatcacatctcccatattgtcaccatgatctaaatgaaggacaaatggaacaggactatttttaattcttgcaaggacatattggaaaaaatcatctttcgtaaaatctaattctgttggatgcacagcaataattgctggagcattgtttttttcagcttcttctactaccacccgtaaaaagttactgtctgctacattaaatgctcccaccgcgaatttgttttctttagctacttctaataattgtttcatatttactaacatattttcatttctccttttaaagtgattttccggttgaaccggataagtgaatataatatttaacagcttttgtgccggcttttatcgtttcatgaattaagtccacatagttaacggccggactttcttttaagttagtttttatttgatttacttgcgctttcatgaagtcggagccaacattgattttattgattcctagtcgaacggattctcgaatgttttccgccccgcaaccagaacctccgtgcaaaacgagcggcatgtttgtcgcggatttgatttctctgacaatatcaaactgaaaagctggtgtaaaaccttctggataatcaccatgggaagaaccataagaaattgctaaagcgtcaatccctgttcgtttagcaaaatcgatggccactttgggatcagtatacatttcttgattagtgtaattatctcctgtcaccgcgccaatattaccaacttccgcctcgacactcgcatgataaacctccgcaaactcgaccatttttttcgtaattgcaacgttttcttcataaggaaaactagacgcatccatcatcacactagaaaaaccatccgctaagcactgcttcactatcgctacatcatgcccgtgatccaaattaatcgctacctcgacactcgcttcttctgccatttttataatgggttttgtcaaaaaacgactccctagatgacttgtcaaatggtcttgaagtaaatcaatgataattggcgcacgaagttcttgagcagcatcaatgaccgcacgagccgtttccagattaaaacaattaattgccattactgcataatgctccttgttcgcacgttctaacatacctttcatggaaacatacatttcaaaatctcctcaccttatgaaattttaattccagacagatcaacttcatcttcctcttctaatccttggtcagcaatgagctcttcttctttagtaggttctcgtttcaagatgagtaacatggctgctgtgacacaagtaccaattaataatgctaaacagaataagagtggttcattcattgctgggacgataaacattccgcctgatggaactggtgagccaattccccaagtcatactaagacctccgccgactgccgcaccaagtgtacaagaaataataacgcgaatggggtcgaccgccgcaatgggaataacaccttctgtaatcatacaaatccccatcgggaaagcaattttgatattgtcttcttctgacttcgtgtattttttctttttaattaatttggaaactacccatgaaagggtcaccccaaatggcggaaccatcgaagcaagaatttttactgcttctggttctttgacgccttcaagaagaagcccatctgcgaataaggaagccactttatttacaggtccaccaaagtcaaatgccgccatagctccaagtacagctccgaaaacaaagcgcatactgccttgcataccttgtaagaagcttgtcatcgcctccgtggcccaaacgattggaacccctacaacaaagtacatcagaagcccgacgactaaactactaattagcggaataatcatcatcggcattaaaccttgcgcccatttaggcacttttaaatatttcacaagaataagtacaaaataaccgactaagtatccaccgagcattccgcctaagaacccagcgccaatcgaattggcgataagccccatgagtaatcccggcgcaattcctggcctgtctgctatcgaataggcaatcgcccctgcaataactggtgcaagcagtcccataccaagcacaccgagagagacaagagcatcaggaatggagtacggtgctttgtagttttcaataacttgtccatttgttaaatttccaatggcaataagtaaccccgaggcaacaactaacggtaacatatacgaaatcgctgtaagtgcatgttttttgatttgcagttttttcatcataccggttcactccctagttatttatttctttgtctattttattaataatttgttttggtgctttaatcgctagatccgttggaatttcgacaactcgttttcctttaaaacgatccttcccactaattttaatatcggcagcaataataactacatcggcatttttcacttgttctgctgaaagttcgtcttcgataccaattgttccttgtgtttcaatatgaacgttgtgaccaagtgctaaccctgcttttgttagtttttctttagcaatatacgtatgtgcgattcccgacgtacaagctgctattccgataatattcatcccaaactcctcctaatcctgatttttggctaacaacttaataaaatcttcttttgtctgtacagtttgaaattgaccaatcacctcatcgtctgccagtaagattgctactttttgaagtaatttaatatgagttgttgtagcatctgaatttttcactgcgaaaagaataataatatttacaggtttatcatcaagcgactcccactcaacgaggtttttagttcttccaacggcaatggatgtactcgtaacacttgtcgacttcccgtgtggaatagcgactccttcccctagtcccgttttaccttcttcttcgcgatataatacatctgctataaaagcatctttgtctgctactgccccagtttcaacaagtaaatctgttaactcttcaatgacttctaatttacttgtagcttgtaagtctaaatttacaagtgctgggcttattactttgctaatatctaattcttggatatccatggattcgcctcctataaactttccatcaatttttttaccattattttatctttctcggtaaacatcgcacttacaagtaacgacgggatttcttttgtgctttctgtattaattgttgttagaataaaatcaatattctgatagtcatgtaagctatttttgaatcttgtagatgataaaacgtctactatttctacatctggaaaagctttttgaacctttactttcaaaagttctgacgtcccaatgccgctcgaacacataatgataattcgtttgactaacggtgaagcttcgatatgtttcgcgaaatatatagtgatatagccaacttcatcatcagaaatggtatttaactcaaaggtttttgctgcatcacgtgcagtttctttgatgatttcaaatagtttgccatactctaatttgatgtcgcttaacaaattattttttatattaatttgatgattcattcggttgaccattggtttcatatggctcaatagctcgatctttaattgctttttattaatcggcatattaattttagcagccacttgttcaatataaaaatcagtcatctcttccacaatcggtaaaattttacctggaactaattcgatttcatggttaaaacgagaagaaatcaagtattgtaaaaaatggaaagtctctcgcttcggtagcttcatttttaaatattgttcaattgcatcaatggcttctacagcaagcgtatgcaatttttcatttgtgacgatataatcatcatcactttctttaaaatcttctacctccccttgacggaaacggttgattaaaatatacaaatgcgaaaagatattaatatcatacggatacggaatgctaatcatcagcttgttctcaatcaactccatttgccgcacaataaactgaacgtcggctttattgagatcactgtattctgttttcaaatcatcataggtcgataaatccaagttgttaatcacttcattaatggcggtccggatgttttcttcagtgccaacaacccgtatttctttttgccttttttcaagagccaaatcatatttctcgatggcttgatttaaaagagagaaatcatttttgattgaattatacccaacataataatcttcatacagctctgttacattcaagtactttggtgatttaaacaatacttgcagcaagattttttcacgtctttctgtcggtgtatagccaaaaatatcacctgtcgtttctaatttcgcttgtatgtaagctttgtaatctaacttaaaaccacgccccttttcagaaatgatgatatcctttcttccagttgtctcattgatgtttttaatcttgcgataaatcgttttagaggaaacgtctagaatttcagctaattgctttgctgtcaaaaaatcgtttttcgttaagaacaagttaattaatgcatgctccgatttggttagaagcatttcatcacctccctctacgctctattatacacaaataaaagaaaacggttacaacaagttatgtccactacactagacaattttttggctgagtttgtgaaaaaagtaatcatcatagctctttacttttagcaagacaatcctccaataaaaccgtataataaaaacagggaacaattagaaaggggtgctcgtgtgacgcttgaactacataatgttacgaagaaatttggaacaaaagtcgctgtcaatgatttatcgtttcgggtagaaccaggaaaaatactcggattaattggtcaaaatggcgctggtaaaacaactacttttcgccttattttgcattttttagaagctacttctggaaaaatcacttgggacggcaaagaagtaagcaaaatcgatccaaatattatcggctatttacccgaagaacgtggtttatatccaaatgtcacaattgaagaacaattaatattttttgctgaattaaaaggatatccaaaacaaaaaataaaggcagaaattgatagctggctagaacgcgctgaaattgtcggtaaaaaaacagacttaatcaaaacactatccaaaggaaatcaacaaaaaatccagcttttaagtacaattatccaccaaccaaaactagttatcttagatgaaccattcagcggtttagacccagtcaatgcagaaattttgaaaaagtttgtatttgacttacgcgcttctggggcagctattattttttccagtcatcggatggaaaatgtggaggagctttgcgactcgctattaatgttaaaaaaaggaaatgtggtcctccaaggaacgactgaatctgtaaaatctgtttttggtcgtaaacgtattttgattgaatccagccacagtgcagcagaactcgctactttacctggtgtattaaatgtccaaacccaccgtgatggcgttctacagcttgaaattgcgcatgaaagcgacgcagagaaaatttttgactatgtaacaaaagatggtttcatccaaacattcagtctccaagctccaacactggaagaaattttcaaatggaaggctggtgagttgaatgagtaaattttgggtgataacgaagcaagtttacaaaagacgtgtgaaaacaaaatcatttttaatttcactactttttcccgttttaatcgctgcgctcattgctggtattccgaaaatggtcgactattttgactcaagtagcgatattacaaagcttgcggtacttgcagaagatcctgtttttgccaaatccttggctgctgataaaaatcatttcaaagtaaatacggacattaaagacaaaaaatccgcccagtccgctctgaaagacggtaagatagacggatttgtcacgattacacagaaagatgattcagtaagtgccgtttatacaacgcaagaaacagctggtcaagatattattacacgtttaaccaaagaccttacagctaccaaaattgctgaaaaagcagccgcctataaaatcaccaatgaacaattgcaatctatcacgtctcctgtttcggtcaccaatgatttagaatccaacaatcagttaacaaaccacgaaaaagatgtgatgagtgctgctgtcctgattttaacactaattatttttattttcgtgatgagttatgcaaacattgttgcttctgaaatagctacagaaaaaggcacgcgcatcatggaagtcattttatccagcgtttctgcaacaactcacttatttgccaaattgactgcgataatttttatgcttttaacacaaattgggttttacatcatttgtggcgctatcgtcctaattgctggtagaaatactgaaatggtacaaaacgtcttagatcaaattgctgttttcccagcctactaccttgtgctaaatttactatttgttattttaggtttgttgttatacattttactcgcagccatgattggttcgatggtcccgaatgtggaaactgtggctcagtttatttatccgatgacgattcttgctattattggttactggggttccatcgcagcagctaatgccccagataagatgcttgttatcattggttcttatattccgacattctcaccaatgatgatgctagcacgaatggacttactttctgtttcaactatcggtatctttagttcactcgccattttacttgtgagtgttgtcggcgcatttttcctcactgtccgcctttaccaaggaaatgtgctactttacagtaatgacggtctatggaaaacttggaaaacatcactatcttatgcaaaaagaaaataaagaaagttggtacattatgcaaatcagactatctaaacgagaagatgccgcttcaatgattgaattagaacatttagtttggacaccaggaacaacgcctggcgatatccattttgatagcgaggcagaatttttacttaaaagtccgcccggttccaaaattgttgtcgtgacggatgataaagtagttgggattcttggttataagtcccctatcccactcgcatcaaataaacacgtcgcagaaattgatatcgctgtgcatccagactatcaacgcgcgggcattggtcaacttttaatggacaaaatgaaggaagtagcgcgcgaaaaaggctacattaaaatcgccttacgagttttatccatcaaccaaaaagccattcgtttttatgaaaaaaatggctttaaacaggaagggctcctcgaaaaagaattcattattcaaggcgaatttgttgatgatattctaatggcttatttcctctgacaaaaggcctggcttaaaattcaaactatgactttataatcattttactaataaagcgtttacatttatttagaatggttatatatatagtacaacgaacaaataaaaggtgatgcgaatgaaacaaacttggtgtacaagctgattttttctcagctttgtcatatgccggcaaacgtctggtgaaggattttagtgtcaagcaactacagttagcttacaggaggaaggcgaggagtatacgccgcgtcaaggactttacgctaacttagttgtaggaagacggaatttcgttacgtcgctcgtttatcaatattttttatcctcactacattggtaaataagcgaataaagtatcgtatcattcatggccactatttaagcaagttacgggcgctcatttattcgtaagttagaatatcttgagaagtaagtagcaagacaaagaattcgcctacttgtttgaaaatgcctcaccgttttccgaatgttgtatgtttattcagaaacatccagacatagtccggcccatcagatgagtggcaagacaagctcatccgaaaagaaaaaccccgcgtgacgaaatcgtcattcggggttttttgattctgaaaacaagatagagatatttttatcgtaaaactgttgaatgactgtgtgacatttttcaaattccttcgcttctaaatgcgttactaattcctccaaggcctgcgaaacatctattgtaaaagcctcgaaaaataacttttcattcttttctttcatatttcgcagtgtctggcttagtatatcaatgttcttctccattgccggcatttctgtatagtgaatcatacaagcataaaagtttttcacatgattaataaagacttctgtgtcatgctctcgagcagctagttttatataaactaactcctttcttaagcatgttgcgcataattctgcgtcttgttcttgtagtttttgtacagcataatttaaatgaaaaaaagctaactttaatcgtgatttttcgcgatgctcggcttcactattcactgcgactgaaaaaccgctctctccgatgttcttgcatagtataccactcttatgtaaacaatggagcgcactaaaagctactcgtttgctgacctgaaatcgtttcatgatgtcttctatgtccactttctcgccattttccaaagtattggccattatctcattcttgatttctccataaatcggatctgcaacaaatccacttttttccataattcgaacctctttaatttttattgctttcaatgttatattttacacgaaaaatctctatttagatatggctttttgcgaaaaaatgtgtccattacgttacaaaaacaattgtattgttataacaaaaatagacaatagattgtaatgacaaacaatgattatagtgttatatttatattgtaataacaatataaacaaggagtgattgttttgagtacgtacgatttagcacctgaagtgaaaattcatcaatttgatggtgcttgggctggttataaagatattgccggagagctactaacagccatccaaaagaagaacaatgaacatattatcgttgctattgaatgttaccctggaacgcgaaatgaagaaattgttgccgaactacttccattactacctgtcgaaaaagcggttttcgcggatgagtgggcattaaataacgaagaagtaacaaataaagtccaatctcacttaacagatgaccgtgtgttcggcattatgtcccactatgaagtgagcgacttttatccagcagaaaaacttgctgaaattcaagcagaaatttcggctagtaaggggttagttgtaatttacgggactggcgcaacagttatagcaccaaatccagacatccttatttatgccgatttagcgcgctgggagattcagtgccgttaccgcagagaaaataaacctaactggaaagcagacaatgcgaatgaagatgcgcttcgtaaattcaaacgaggttacttttttgaatggcgcatggctgaccgccaaaagaaaaaactttatcaacaaatagatttcttacttgatacaaataaaaaaaatgaaccaaaaatggtacgcggggaagattaccgaaatggtttaaaacaagtttcgaaagctccttttagagtagttccttactttgatgcaagtgtatggggtggccagtggatgaaaaacaacttcggacttgaccctactgctgacaattatggttgggcatttgatggtgttcctgaagaaaatagtttatacatgcgatttggggatattcggattgaagtcccgtctaccaatgtagtaaaccatttcccaaatgaattacttggaccaaaagtacatagccgtttcggtacggaattcccgattcgttttgactatctcgatacagtgggcggtggtaatttaagccttcaagtccatccattagtagagtacgcgcaagataagtttggcattcattatacccaagatgaaagttactatattttagaagcagatagtgactctaccgtttaccttggaacaaaagaaggcacaacaaaagaagcaattatggcagatctagaaaaagccgctgaaggaaattaccgttttcccgatgaaaaatacattaacgtcttcccagtgaaaaagcacgatcatattttaattccagctgggacgattcattgcggtggtccaagtaccgtcgtcctagaaataagtgccaccccttatattttcacttttaaattatgggactgggaacgcactggactcgacggcatgcctcgccctgttcatttagagcacggcagagaaaatttacaacttgaccgcgataccaaatgggtaaatgacaacttaataaaccaatttgaaacattacacgaagataacgattcaaaagtagagcgcaccgggctacatgaattagagtttatcgaaacacaacgccactggtttaaagaaactgttaccgtccacacaaacgatagcgtcaatatgctcaatttggtagaaggaacaagtgctgtcgttgaaagtattgacgactctttcgcaccatttgaagtgcattacggagaaacatttatcgtccctgcaatcgtcggaacttatcaaattagaaatacaaacgctagtgaaaaagtagctgttattcaagcatttgtacgtaacttatagtaaaagaaagcctatcaagattgttgataggctttcttttattcaaaatcaatataatatcgataatgctttcctacataaaagcattcactgtattctctaaaatcactttctttttgtttcgtcatccgtactctttttaaaattggttcctgcttatcgattgctaaagcttcctgaacttcacgatttggtagcatagcttcaatatattccttttcttgattaacgacaatcccaaatcctttcaaatattcataaaaagaaccgtaataatcttctgcttgaagggaatacgcttgtcgataaggaatcgcactgataaaaagagcaaacgccaagtctttcgtgcctcgtagccgcttaacttgtaaaaccttatccccaactgcaagccccaactgcaacgcaatttttttatcagcattgatcacttctacttctgcatgtagcgtagccgcttttttaccaagttctttcatctcattcgtaaaactgcgcaccaaagtaaaatgctcatcctctgcttcttcccagtcacgtacaaaagtacctttcgcacgctctctataaagtagattctcacgaacgagttcatcaattgctttccgaacggtaattctactaacgttgtataactcacataaatccagctctggtggaattttatctccggttttccaaattcctgattggattttttcccgtaagtcatccgctatttgtgcataaagtggcgacgcatcattcatcttatttaattttctaaccattttaggtcttccctttcaaattgtattattgtcatcacaataaatcatagcataagcttattcaaaattccaatataaaaagtagagcgataaagctctactttttatactattctactgtagctcaatagttaaatcaccagttttcaagcgttcctttttaataagaaacggtctgacaacaagtgcaataacacctggcaagacaactgctaccaaaataaaagcagcaagtgtgctgaatccataatttgctattaaataaagtggtgcaacaaaggcacataacccgagaccagcgacttcactcgcggcttggatatggaacaccatcacgccaagaggtccagcaatcagtgttgttagtagtggtactaacataaggctaggctttctaataatattaggtgtttgtaattttggtgtacagataagttgggcaaaaaatgcaccccagttattatcccgataacttaataccgcaaatgacacaaattgtaccgagcagccaatcaatgcggcagcacttgctgttggatcaagttgaagcgcaatcgcgagcgcagcagatgaagctggactaagtatcagtaacccaaacacaaaagcaataatcatcgatgaaatcagcggtgaaccaccaattaatgaactaattccaaggcttacagaagctaaaatcggtgccattatctttgcaaataaaataccactaagtccaccagctaaaagtgaaacaccgggaatcaaaatcatatcaaatttcgtctttccagtgactcgcttcccagtccaaaccgccacaataacagccaaaatagctccgactggttctccgctagtaatagcaactccgccaccagctaacgtcgccactgccccgcctccaataacagcagaggctgccgcacttatcgtcacaagcgtgtttgcgtgcaagcacatcgcaataccaacaccaattcccggaattaacatcgttttaccaattgcgccaaccgttgcaagaaatgaaatccctgtcatctgcccaattgtttgcaaaagaagtccaattccaagcgttacaagaaccgcattcgcaattcccatagaagccttataggaacgatctataaaatattctttcattgcttctccctttctaaaatgtattctttctcattgtaagcactagttaattaaaaagctagttttatttactgattttcctttaaaaatgttaaaaaagtttcagcaattcgattctcaagcctttgtctgtttttcagtaccgaaaacttccgcattaagctcccagactcattaaaggtctgcattttccccgctgtaatttctgtttgaacaacacacttagaaataacagtgtagcccatcccttcaagaaccatttgtttgaccgccatattactccaggcaacaactttttcagcaacattccagccattagtacttaatacatgatccaaatattcacgcgttcccgaaccttcttctcgcgcaatccaagtcgctccttgctcaatttctgtaagcgaaccgtctgctcgaccaacgatacacatttcatcatccgaaaaagcacttatctctaaatctttcttactcacctggccttcaattagccctgtgtccacttgaagaagttcaactttgtcagcaattttcgcggtattttcaatgataagttctattgtaatatccggataaagggcatgaaatttcgcaatcacttctggcagataatactctcctatcgtaaaactagcaccaattcgaagtcgaccttttaaatgatggtgatataaacttatttcatcttccacttgtttatatagtccttctaattgcttggcacggtggtataaaatttctcctgttgctgttaaaataaacttcttagcttgtctgtaaataagctctgtttcgtaaagctcttctaatttctttaattgcaacgatacagcgggttgcgaaatgtgtaattcttcagctgcttttgtaaaactttgcaattctactactcggatatatgttcttaatgcctcatccatcgtaacacctccataaaaataacttatcaataatataattaatataaattttactaataaaatcaggaatggtaaagtaaaagtataaaagaaagggggatgaacatgagtcaaattttatttaaaacgaagacattttggtatggtattgcgcttactttctgtattgctaccttatcttattttttagcgaagttaccatttttaatgattctcggacaacttgtaactgctattttaattggtattatcattcgtgcacttttcccagttccggataaatggtttactggtattcaattttccaacaaggtaattcttcgtgccgggattattttacttggtttccgcttgaacttagttgatatttatcatgctggatggcgcgtatttctaattgctgccttatgccttagctttggtattactattgtttatttcttagccaaactttttggagtggataagaaactagctattttggtcgcttgcggtacggggatttgtggtgctgctgcagtagttgcgatttctccacaagtaaaagctgataacaaccaaacggctgtggctgctacgattattgcactacttggaactattttcactgttatctatacgttgatttatccaattctaccacttggaccagatggttatggtatttttgcaggggctacacttcatgaaattgcccacgttattgcagctgcagatccaggcggctcatcagctgttgatatggcggttatcgttaaattaacacgtgtagccttacttgttccagtctgctttgttgtcgcaaaaatggttaatgctgggactaaaaatcgcttttcatgggctgaacttcctgtaccatggtttattttcggctttttagcaactagtgcaattaatagctttggaattattccaacatctgtaactgattttcttgtcatctgcgcatattttctcattgctatgtcaatgggcggactcggtttaaatgtccacttgccatcgttcggaaaaatgggtggaaaaccttttgctgcggcgttaatcggttctgttttcctctcagtatttggtcttgctttagtacttttgtttcatttagcaggttaagatgtcctcgtcacctcgatttatgatacaatagcaaacacgaggtgactatttcatgacgaaagcaatttggacttgccgagcgttcttactcggatactttcttgtgctgcatttcactgcagatacttacacttttctaattttaaatgtcgggcttgcttatatacctttcgaaatagcagtatttctcacaaaaaagcctcgcgtctggtggattttttggccactagggattgtttggctagtatttttcccaaatgcaccgtatcttttaactgatttacttcatttacaacgtttagaaatttacggagcagaaggagtactttcaacagcaccttggttatggcgacatttcacttatattatcgtcggtgtgttctttggattatttattggattctggtctttcgcaaaaatgcttgctgaaataagaagacgatttaattggactagtttactaagttatcaattacttttgattggcttaatattattatctagttatgcgatatacattggacggttctctcgcttacattccatccatttacttacgcagccaattgattcattgcaaattatgtttagtgtttttcactggccattttggaattttgtgttttacttttcgattatccaatatgtaatttatacgctatttagcaggttttctagctcactaaaaaactaaaaacgtttgtattttaggaaaatttattttcttaaatacaaacgtttttttaatcgatatggagcttacttcgctctgttgaaaaaccttgaggataacgacgctttaatttctcgatatttaattctgctactgtttccatgcttatatctgcccatttagcaatttgtgatacgtaccaaagtacatctcctagctcttttgttagagactccttatctaaatcatgtccatgaaaagcatatttcttaatcaaatcggcaacttcaccggcctctccagtaataccaagtccgtaatttgttagtgcctgttcgtgtgttgcagcagttctattcgctaaaatttgatactctttaaaatccatatgttttcctccttgcttctctcactttcttactataacagataatttttttcctttgcagtcttgactatttccaacttatgcgaactgatgctctatcaatgcatttcatctttaaaaattttttatctttaaagtcttatttttttcagataattcctatataatagagataagatttctgaaaggagttttcaaatgaaactagctggcttagtgttacttctgattggtttgattggttttggcttttcatttagcattaccggacttatcggttttggtgtatgtatcatttctattattttagttatagcaggaatttttacaatgattcgttcaaaaaaacgccgtaaacgttcttattcttattaaaataaaagctgctttatcatcatttggtaaagcagctttttttatttttttggccaagttctcctacgattttctgctaatttcattcgaacaagttcctcgccgtccgcccccatactctctgcaatttgaagcgcatagataagcacatcagctacttcttttaaaagttcttcacgattttcttttaacgctatttcatctgttttccactgaaagcattcaagtaattctgctgcttcaagtgacaatgaaattgccaaatcttttggatgattgtattgatctagccaatcacgctcttttagaaaagcagtaatttcagcttgtagttgtttcactgttttaactcctttagaagaatttatttgtgaaaaatatcgcaaggactcgtaaaaaaaatgagcaccaagccgcctatttacaaggaggcctgctactcattaaattacgcgtttaatgaaactgcttcttcaattttgtttggtggaataaatccatttaaacggtggatctcttcgccgcctttgtaaagtacaagtgttggcgtttgttgtacatcacggtcaaaaaagaagttttcgcccatttcttctaattttacttttaatactttcactttgcttgcgatttcagagtttttgaattcagcaaaagaaagatcaagcattttacaattaggacaattatctttccaatagtctacatatactaattcttccccattaatatgagcttggaactcttcaggtgatttaatttcaatacttgtcatttgattccactccttagcgctaaaattttcctgacccaattgtctatgtcagccacatcttgctcggtgtgtggcatttgttctatttttaaggttgggtagcttgttccgaaatattttgccattcggtcgacagctccgcaataaaaatccataccccattgtgtttccccagtgccaaaaatggctacattcttgggctttacggctagttccgcgataaaatctttcatatctggcggtgttcttccgtagtcgactgtccatgcccccaacacgtacaagtcaaaatcctcatcaagcggatactcggctaaaggagatacgcgaaaggacacaacttcatgcccttcgcttattagtatctcttcaatttcatcagctaccatttttgtgttgccgcttagagaatcataggctaacaagattctcataaatcgtcgaatccgttatccatgttcgtttttttatagcttgaattgcgcatttcgaaaaagtcggtttttgtttctgtaaagttatctgcataggctttaatccatgtcattgtgttgtcactatgtcctggataaagttctggaataccaagcattcctagcattttgttggcacgatatttcacgtagtcaaccatttcttccacatctataccttcaataccttgtaaaacttcttcggaccattctgtttcaagttcaacagcgtgacggaaagcttcatgtgtatattccactagctcttctgtttgtaattctgggttttccccaaggattgctcggattacttcagagataaattttgagtgagctaattcatcgcgattgataaagctgatgatttttcctgttccagtcattttattttgacgaaccaggttgtagaagtaagcaaagccactgtagaaattaattccttctaaaatagaagattgaattaatgcttttacaagtgtttcacccgttttattattcatgaaatcatcatatgcgtccatgattggctcattacgcttgataattgtcggatgcgttcttgcaagttcaaagacacgattttgttcttgtaaatttgtaatagaagcaagtacatacgagtaactctcattatgaattacttcttgttgtgcgataattgctgcgtttgcatggactgctggatcggtaatatattccgcaatgttataaataaagcgtgtttgcggagaatccagtgttgcaagtaagccaataatcgcatcaaaagcatatttttcttgttcagaaagagcgggatattgttttgcatcgcttttcatgtctacttcatctggaatccagtagttagtagaaagttctttatacgcacggtagaaagaaggatacgggatgtcgttccaatttaaaatcccactagtttctccgtttatgattgaagtagaacgattaggaaataaaggttctaaaattttaatacgtgtcagttgttctttttggttagccatctaggcaagccctccctttcttattgtgttattgataaaatgttttagagatttatcagcttgagcaccattcgcactcttctacatcgatatcgttggagcggacatagtaagttgtttttagtccttcattccaagcagtcatgtgtagttcaagtaatttacttgctttgataccacttggcacatagaagttaaagcttagtgattggtctacgtgacgttgacgacgaccgttttgacgaacgcttgcgaattggtctactttgtaagcacctttttcgtagtacgggtatgtgcttaagtttaagtctggtgcaattactggacgacgatagtcttttttctcttcatagtagaaagcactgtaaattgggtcgattgaagcagtggatccagcaatttgagctgtactcatatttggcgctacagcaacaaggtacgcattacgtaagcctttttctgctacttctttcgctaattcttgccattcaggtgaattatagttgcgacgcgcgaaatattctcctgtattccagtcactgcctttgaagactttgtaagcacctttttcttgcgctaatttgttactagcgcgaatagctaaatagttaatttgttcatataattcatcggcatatttctccgcttcttctgagtcccaagcgatatttttaagagcaagcaggtgatgccaaccaaatgttccaagaccgatagaacggtatttttggtttgtaatagttgcttgtggtactgggagttcgtttaagtcgataacgttatctaacatacgtacttctacttcgattaaacgttctaaagtaccttcttccgcaacaaccgcacgacctaagtttacagaagataagttacatacaacaaaatctcccgcttgttttgtaatgacgatttgatctccagaaataatttcttggatcatttttgttgggctcatattttgcatgatttctgtacataagttactagaatataccatgccttcatgtttattagggttcattctgtttacttcatcacggtaaaacatgaatggattccctgtttctaattgactcatcataatacgtttcatgatatcaatagctttaacaatttttttgctaattgtttcatctgcaactaattcttcatatttttcacggaaagtaccttcgccttttgattcatcgtagaaatcttgtaggtaccagccttttttcgcttttacttcatgtggatcgaataaataccactcgccacgacgctctacagcttccatgaaaatatcaggaatacaaacagccgtaaatacatcatgtgcgcgtaaacgttgatctccattgtttaaacgtaaatcaaggaaagactcgatatctttatggaaaacatctaaataaactgcaattgcgcctttacgttgacctagttggtccacgctcactgccgtattgtttaattgtttaatccaaggaataacaccaccacttgcaccttttacgccacggatagcagctcctgttgaacgaacgtaaccaagatatgcaccaacaccgccaccgtgcttagaaactctagcgacgtctgtattgctgtcataaataccttgtaagctatcatctactgtatcaatgaaacagctagacaattgaccgccaacttttccagcatttgcaagtgtcggtgttgcaacggtcatatataaattacttaaagcccagtaagcttcttctactagtttcatccgtttttcttttggttcattttgcattaaataaagtgcgatagttaaccaacgttcttgtggcaactcatacacattacgttcagagtcagtcgctaagtaacgcgtcgcaagtaaatacaaaccattatacgtaaataatttatctttctcagggtcaattaatttccctgctgcaatcaaatcttctttagaataattttttagaatattgccagaataaataccacgttcgcctaggctctcttgtagtccaacgtacgaaccatatttatcatcatcattatagaaacgatttttacttgcttttttatataatttatttaaataaaggcgtgctgcgaaatgttcccattcaggaatatgaatatctgtacgagcttctgcttccctaattaaataatcgactaattcgtcagccgcgtaatcttccttcttctctacaaaattaaaaaccttacgtttgtaatcctctaaatcaagtttcggaaattcttcatggattttctctaaatatccatccaatcggcttttgtcaaaaggtagctttctgtttcccccgtcttttactatgtaagttgtcatttgcaatccccatttcatccttttttcctcgttgtaaaaatatctgattcattttgcgcttttcattcgtccgctgaactatttgtggtcgttccatggagcaaaaaaattaacttttaaaggagcaaattcccctgataaaagttaaaaggcgatgaagcaatatttcgctttcgatactatatatagtataactttttcattgtgaatgcaagatatagtactctggttttattacgaaaagtgtccaaacaatgattacaactaggttttcggcaaataaaaaaattttttccgacacttgtgtgttttcgagcatatttcaagtataaaaatgctactacttctagtgcctattttttcgctagtttctatatttagtagttaaaaaaaggatgttttgtaacttcacaatcttttaaactcacttttgtcacctttctgacaaaaatgtaagattaacgctggattttgttagttaacaaacgggataattttgtcattccattgtaaacttaatgtaataaaacaaatcaagaaaggatgagggagaaatgtttactaaaaaaagaggtttaatgttattagccgcagttcttctaactgtttgcgcgatttgggagtatgcgatgccaactgacgccgcagtaaaatcctattacgtaaaagtagaagacgcagggaaacccgttcaaaaaaatcaattcaaagggttcaaatatgtatcaaatgtttatgatgacaaaggaaaacaaaagcaactaactttctactcagaaaaagaattaactaagaacgagcaattcaaagtacttgtcggcgagaacaaaatggttgttaattataaaaaaataaaaaacgtaccagataaaattaaatatttagctgaaaaataaaaaacgctttgttatagcctgataaaaggctaaacaaagcgtttctgttttttattaaggtgtaacaatattgaagacaggattaaattcatctaacaaggaagcaaactccccaaatttcttcacgtctccttctagtttagctgtttggtcagcaaatgctgcttcaaagcttttcacaccaccgaagatatgattaaatgtatcacgagtagtagttaaagttaaatcagctttatcgtctacttcaccttcacgataaataagtactgaattatttacaagtaaatgataattctcatcaacatctgttaatttccagttcatggagatacgtttaccaatggatctttccccatttaaacgaatacccatgtaatctaaaatcaagttaaacggcataccctccacaatatccagtgtaacaccagaaataacttcatctgggacagaatttctcagttcatccgcaccagctaaaaatacattacgccatggtccagactcagattgatagccaagttgttctaacgcatctgcaagaagagctcttgcttctccgttttctccatctgcgaaaaccgcatgtttgacaacttccgcaacccagcgatattcacccgcttcataggatacacgcgcttttttcaatacttcatcaacgccacccataaactcaacgtattttttcgcaacatcttctggaggtagcggataaaggtcagcaggatttccgtcataccacccaagataaaattgataaatcgctttaacatcatggttaagcgtaccgtagtagcctcgtaaataccatttttcttctagtgcaggagggaatttcacagcttcagctacttcaatagcagttaatcctttattaataaaatgaagcgtttggtcatgcatatatttataagcgtcacgttggtgaataagcatatcattaatttcttcattcccccacgttggccagtgatgttgaccgatacaaacttcatatttatcgccaaaggcacgaattgctttgtcaatatctttccaccactcataagcgtcacgaatttgcgcaccacgtaatgttaaaatgttatgcaagttatgaacggcatcttctgcgatattaagtagtttaaattgtgggaaatacatcatatgttctgaaggagcttctgtatttggagccatcaagaattccacttcaatcccatcaacaacacgtttttcgtgatcaaacgtgatagtatcatttggagcaagcaaggacatatgacctttagaagctgttttaccaagaccagcatctacttgacctaattccccgcgtgacaagcggctaccatacatatattctgcacgacgaatcatcgcgtttccagcaaaaatattttcactgaccgcagcttccataaatccttctggcccaataagtgccacttttccagaggctacatcttctttgctaataagacccgctacaccgccgtaatgatcggcatgggaatgggtataaataatcgccttaataggtttttttggacgatgctcatagtatagatcaagcgccgcacgagcagtttcaaccgacattaatgtatccgtaattacaagaccagtatcgccttccataatcgtagtattcgacatatcaaacccacgtacttgataaacgcggtccgttactttgaataaaccatttgtcatattaagctgagcgatacgccacaaacttgggttaacagaatcaggtgcttctccttcaataaacttataatcctccaaatcccaaactgcatggccatcttcagtatctacttttacatgatcccaagttccaataaaaccttttttagcatcatcaaaatctttcgtgttctcaaatggtaaagatttttttactttctcattcactttctttgtaaattcggacgcttcttttggtaagactttttttgtcattatcggtttcctcctgcacgtttattttcacatactttctttttatacctccataaaattattcaaaaccttttgctattattagaccaaaaaaagaggcttgaaaaatccaagcctcttttttaacttattcggataatttctttttagcgtcaccggttttatcttctacttcgcctttagctttttgagctttaccttcaacttgtttgcctttgtcatctgttgctttcccgaatttgtcttttgcgtcacctactactttatctttcaatccttttgctttgtccttcatacctttatcttcgctcattgatattgcctcctaattagaatattttctaatgaagaattctttatctccatagtagtgttttccacaatatagaaagctaaaacatcttttttaaatagaatggatagttcgatttgtctcagccgcttcaaatatggcttcaatcaattttaaaacttggtaaacttcttcattttgaacgatgggttcactcgtattatttaaaacatcgataaaattgttatagaaagaaggagctaatttggcgggcgctggaagtgataatgtattggttgcttcttcgcttggtggtgccattgtttttgttagaccttgaccagctttgattggtgttggctcagacgttttagcaagcgcagttggttggacgatttctccgcttaaatcccaatcgtggataattccagttccttctgtgcctttgacgtaccagcgaggtaatttaatgaaattggttgttccaacttcgatttgagcagtaatgccattctcaaaagtaatgaatgttacaaagccatcatctacttcatctccaagcgcaaagcttagattagcagatacagatttcacgttactatcgactaggaataacaattggtcaagtagatgcacaccccaatcaagtaccatcccgccgccatgtgctttcaaatgacgccaatctcctggaataccatttgctccgtggacacgtgattccaggtggaacatttcgccaatcgttttttgttcaaaaatttcttttataattaggaaatcttcgtcccaacgcctattttgatgaaccatgaaatgtttatttacttttttagcaacatccataattgctagtaaatcttcgcttgtcatcgtcactggtttctcgcaaacaacatgcttacctgcttcaagtgcagtaattgccagttctttatggctatcattcggtgtcgcgataagaacggcatctactttttcatccgctaaaaccgcttcaaagctttcataaattttcaaacctttttcagcagcggcttcgcgtttttcttctagaatgtcgaatacgccatgaacttctaaattatcagcagccgatgcaagcgttacatgatagcttcccatccctccgtaaccaacaattactaattgatattttttcatcctaagacaccctttcttatcgttaagcccaccacatatccagtggtttatctttaattaaaatcgattgtaagtttgtaacagcacggtcgaagccttcatcaatcgacattaatggatcttcgtgttcaatgctgactacataatcataaccgtatgttctaagcgcgctcataatatccgaccactcggttaaactatgaccacaagctaccgaacggaatgtccaacttctcgtttgtacatcgccatatggttgcatatccgttagaccgtacatattgatattatcttgatctaaatacgtatctttggcatggaaatgatggattgctccagcttttcctaagattttgatagcgccaactgggtcgattccttgccaccataaatgacttgggtctaaattgactccaatagaatcatttgtttcttcccgcaattttaaaatagtatatggggtatggcataagaaaccgccgtgcaattcgataccaattttaacgccactggctgctgcaagttcaccaatttctttccagtaaggaattaattttgtttcccactgccacgttttaatatcgctataaacagttggccatggaataaccggccagtttggcgctttggcatcatcactatcaccagctgttccagaaaatgtattaactaccggaacattcattaatgaagctagtttaattgatttacgtaaaatttcatcggacgctgccgcttcttctttatttggagagattggattatcatgacaactaaatgcgctaatcgttaatccccggctagtaaatttttctaagtattctttgcgtgctgcttcgcttgccaaaagttcgtccgttgggcagtgatgattcccagggtttcctcctgtgccaatttctacagcatcaagacccgctgctttcactttatctaacatttcttctaatgataaattagcaaataatggtgtaaaaacgcctaatttcatttttatttcctccctattttttcaagtggttggtgatttccgtatgccggataattcttccgaccttccgcgcaccaatgtacgccgttaataattacttgctgaatatccggatggtgataggttggataagattcgtggcctggttggaaatagaaaatccgaccatttcctcgtttgtacgtaatcccactgcggaaaacttcgccgccttcaaaccaacctaagaaaattagttcatcaggggtcgggatatcaaaatgctcgccgtacatttcttcctcgtccaactcaataaattcgccgatgccttttgcaattggatgcgtcgggtcaactacccaaaggcgttctctttcatttgcttcgcgccattttaaatcacagcttgttcccattagacgcataaagattttcgacatatgaccagaatgtagtacgacaagtcccatgccttctaacacacgtttttgtacacgatcgacaattttatcttccacgcggtcatgacccatatgtccccaccaaatcagtacatccgtattcgccaatacttcttcggtaagtccgtgttcaggctcttctaaagtagccgttcccgcctcaattcctgctttttctagaaagctagcgatttgcccatgaattccgtctggataaattgccaacacagcatcatcttctttttcatgtaaaaattcgttccacactgttacacgtgtcatattagttctcctccaatacattcgctaaatacgtataacctttggccacgctcgttagcggatcttgcgtaaatgcttcttgttcaataatcagccattttgttccagaatgaagcgccgttttaacgaaacctggcacatccaaaacaccttcaccgataatagtgctttccttgtttgctctcgatttatccttaatatgaataagtggtacccggttacgatatttttcgataaaaggaataactccaattcccgcatactcaatccagtaagtgtctaattccgcaaccatttctggtacatttttgagtaaactgtccaaaataatttcgtcatctaatttatctaattcatgggcatgattatgatagccaaaatgcatcccagcttgttgaaccgtttttgtgatttcaagaagtttttcactaaatgcaagccattcttgctttgttttaaagtctgcatatgggcaaataatgtattcatttcccaattcgcgttcaaacagaatgacattttctaaatctacctcaagctgttctttactaatatgcgatccggctacttctagtccgagttcagccaatttcgctttaatttcactggcagatttgccgtaataaccagcaaactccacgccgtcataacccatttccgccactttttctaacgttccaaagaaatcatcttcacaagcttccttaacactccacaactgtaacgcaatttttgctttcataaaggcacttcctccttaattaaaataaactggctgtcctgttttcgatgattcataaatagcttctaagatttgtgttacaacaagtgcttgttctggtttaacaacaggatctgtatttttttcaattgcttctaaccattgttctgcttcgattaatgctggatcatcacctgttccgtcgtaaaaatcaacgccacctgcttctaattgaattttcttttcatacatttggctgtgcgcttcgccgttaattcgtaaaccgtcttccatatccgcgccgccttctgttcccgatagagacgtccttgcttcaccgacatcaagtgtgttaagcgtccaacttgcttctaatactatcgtcgcgccgttttccattgtgataaaaccaaatgcggaatcttctacagtaaatttatttgggtcccatgagccccatgcatttgctgcattttcttttttagcaagtttatgataactgtttcctactacatatttcggtttataattgtccatcatccaaagcgttaaatcaagcgcatgtgttccaatatcaataagaggtccgccgccctgcgcttcttcatctaaaaacacaccccaagttgggactgcacgacgacgaatcgcttttgcttttgcataatagatatcacctaattcgccgttctcgcaaacttggtgcaaataatccgagtctttgcggaatctattttggtaaccgattgttaattttttgcccgtacgttctgcagcttcaatcatacttttcgcttcttcggttgtttttgccattggtttttcacacataacatgttttccggcttccattgctgcaatagaaatctccgcatgagaaatatttggtgtacacacatggatgacatcgatggatttatcttggagtaattctacatagtttgtgtatacgcttgcattttcactaccaaattcttttgctgcggcttcggctttttctaaaacgatatcgcaaaaagcaaccatttctgctttctcagcttttaataaacttggcatatgcttcccgtttgcaatgcctccacaaccaataattccaacttttaatgtcataataaaaaacctccaatagttttgatagttacatcatacaaaactactcgaggtaaatcttcctattttattgcttaattattcccgtatattgtctttctgtattttaatggcgcgactcccattgctcgtttgaaggcatgatgaaaagtttttacactactaaagccagctagttcagccacttctgttacagggaacgcctcatttaacaacatccattttgctttgttcagccggtaatcatttaaaaaagtcacaaacgtcattccggtatttcgcttgaaaaatttcgtgaaatagtatgtgctaaaaccagtgtagttcgcgacttcttgtaagctgacaggttcttgataatgtttctcgacataggaaaaaatttgatctaatttatgtagtgtttcttgagattttaagactgcatcttctgaaatcacactatcaggttgagtttttatttgagggatttcccggtatatcaagccgataatcgccagtaggtctgcttttagaatataatgctttccaggtttttccccgcttgactcagaatggatattcataattaaagattgcattttagcaaccgtttcttctggccattccctgctcaaatgtgccatttctgtaagcatttcgcgtaatgtttgcattttgtcatccatttgcatttcttcttgaaataaacttaaatcaaattggataacgatacgttcactactcggcgaagctaaaaaataatgcacatctccgccatttattacttgaatctctccttcttttaattgaattggcatatcattaatgccaagattaaggctgccttttagcgcataaataatttcaatctctttatgccaatgtggataaacaagaacttctccttcattaacaaacgaacgaaaagggaaagctttatttaattctggaatttccaagtattcactcatagcggaactcctttttttctttcattttagcataaaaaagaagacagccgttaaactatcttcataagattataaaattaatgattcatagggaatttcattaaaaagtttttctacatttataacaacaggtattttagtatttagtaagtaaccttctttttttagttcactaagagttaagctaagatactctcttgtaatacccatgaatttagataaaaatgtagtagataattcttgcgggatttgaatgttatctccattggaaataccgtattcataaccaattgcagcaattaaatgttttacgcggtctttcaccttaagcgtattaagcagacatcgacgttgcagtatcataatttcttttttcgcttgataaagcataaattcttctatactaacatgtttttcaaccataaaaatgaaaaaatctctatctactgccgtgatgacactagaacttggcgagagtaattgagcaccgatattgcgttttaaatctgaagacataaaagatgaaaaattacatacatccccatgttttagcaattggtcgtacccaatatagtcatctatttgtgttcctttcataacaatacctttttcaacaaaatagatacctgttacaaaatctacatcaaaaagttcatttttagaaagtttaatactcatactatgtttagcaaaatctccagacttcttacaaaaatgaagtggattggtcaaaatttcatgttgtcgtttttctaatgtgttcattgcgaactcctcctctaaagtataatatcacacaatgaaaacaccccagagaaggaatacgctgaataaaataacgttacaatcattaaaaaagaaatttttcactatttgttcattaaaactaactttttttatgccaaaaacatctaaataagtactttttgtgacattttttctctgctttttttagataatattttaacttttccaccttttttaacgtaaaaatcaatatatattaagttttgttctttaaagtgtgtctattttcttaatgacccacggtttgtgactatcgtcgagaattccttcttttcgtagtttcagtacaataatattcgtatattctcgagtagtattcgcatattgggctaaaatagaattattgatttcatcaggcaaaatgaattctttatccttcgttactcttcccatataaagcccaatctcttttaagcatgctctaatacgaagttctttcttcataaaattacgtttactagctttaaaataaacttttcttgtataaagtaagttagataatagatatttcgctttttgacctgattcgtccaaaacacgttccacaaaatcaggatcaagtacccaacaatgaacttctgtcaggctgcgcagtacagactcttctggttcttccttaataataggaattaaattaattgctatttcgccacctacaaagctaataatccctgaatctccgtattcattttgaaggcaataagagaagtatccactttctactaaatagatcttgaaacctttcgaattattcattttaatttctttacctctaggaataatttcttgataacaataatcatgaaaggtgtaatctttttttagtaattgtagtagtgcttttggcgttgtttctttaaaaatttcctcatctgaatgcattttccaacatcctttccatttgattacaaaaaaactgcagaataaatgcttctgcaagttcttttttagttaaagtatgggtttgtcttcttttcatgaccgatggtagttacatcaccatgacctgaataggctgggaaatcatctggaagtacaaacagttgtgttttaatactgtttattaacatatcaaaatctcctgtatataaatctgtacggccgatactacctttaaacaaagcgtctccaactacgacaaattcgtcgaaaataaaactaacgcttccgatagaatgccctggtgtcggtactactttaaaacgaaaaccttctatattatattcacctaacgtaaattcattttctgcaggttgcgctatgattgctttaccagctatgtgcgcagataaatttaattctggattggatagccattcttgctctaatgggctaacatatactggaatattatatgttttgcggatctcttctaaagcaccaatatgatcatagtgacaatgagttaataaaactgccactggttttacttcgagttttgcaatttccgcttcaattttacttgcttcatcgcctgggtcaacaattaatgctacattatcttgataaatgatataacaattttcttggattattcctgtcatgattcgtttgatttttgtcatttcacttccgcctttcttcacattcaccattatacctaaaatactaccttacttccatcaatattccttgtttgtattcacttccgagatatactacaatgaagaaagaagtttaaaaggaggaataaaaatgactgcaaaaatgttacatacatgtatccgcgtaaaaaacctaacagaatcaattactttttatgaaaaagcattaggacttaaagaagttcgccgcaaggacttcccggatttcgaatttacgttagtttatatggcgtttgaagaaggcggttttgaactagaattaacgtacaactacgaccaaaaagaagcctacgatttaggaaatggttacggtcacttagcggttggtgttctggacgtacgtgctttattaaaagaacaccaagaagctggttttactgtgacagatttaaaaggactacctggcgaagacccattctattatttcttaacagatccagatggttataaaacagaaatcattcaagatggcgctttataagtagaagaaggactggagaagcttaatgggaaaatattttgttataattttgatcgcactagcaattaatggaatcagtattttattccataatgatatagcaagccttatcgctgtcatcattacagctgtactacttatttatttgatggtggacttaacaaaaatgtatcgacgtaaatagaaaaagagtcagcagaatcctgtggattttgctgactcttttttattattgaatcactaaattgcttgcaacttgtttagattctttcataaggttttcgataatatcactagtggaacgaatttcagttaacataccacaaatttgtccagccataacagaaccattctcaacgtcaccttcatggactgcttttctaagagagccaagtgttaattcctctaatttgtctctggaggcattttcgttttctagttctacatatttttgaatcattgggtttttaatacttctaactggcgcaccattgcgacgacctgttacagtcgtgcttgtatccgttgcgtcaagtaccgcttgtttaaagctagctggaaccggacattcctcagcaacaaggaaaagtgtgccgatttggacaccacttgcgcctaatgcataaacagctgccattccgtgaccatcggcaattccccctgctgcaatgacaggaatgttcactgctgaaacaacttgacgaacgagtgccatagtggttgtttcaccgacatgaccacccgcttctgtaccttctgcaacaacagcatcgacaccgatttcttccattttttgagctatttttacagatgggataacagcaatcactttaattccagctgctttaaacttttccatgaatggtttaggcgttcctgccccagttgtaacaactcgcacatcttcttcaataatgacatcgacaagttcaggacaatttggcatcatcagcataatatttacagcgaaaggtttcgttgtcttttctttacaaagacgaatttgttctcgtaacgcgtctgctgacattcctccagatgcgataatccctagaccacctgcatttgatactgctgaagctaattcatatgtggcaatttgtgccattgccccttgtaaaattggatatttaatttgtagcatttcagttaaactcattttcttttctcctctctatttttacgccaattctttagttggttgttttttctcacgtaatttataaacaatattaatacaaagtcctacagccgcaagcgcgatagctatataaaaagcttgtgtgaagtccccgccattttgaccagcaatttgcgctgccatttttggagcaaagaaggcagccgtagaataaccaataaaaacgattccgtagttgactccttggtttttcggaccgtaattttccataacgatggatgggaaaacgcccattgttccgccaaagcaaagtccaagtccaatgattccgataacaaacccaacaacagattgaagcgttgtaagtgctagtaaagacagagcaatcactgtataaataatcattaatgtattagatctacctagacggtcagataccgcgccccaaactactcgacctaaacagttgcttagtgaataaatactaacataagcagcagctgatgcagccgtcaagccaaacatattttggccaattaaggatgcattagaagcaatcatcagaccggagaatgcgccaatacctagcattaaaagaatcagataaaaagtaactgttcgaaccattccagtccaaggtacatttaccataccagctacattgttagcaggtggcgtccaaccttttggtgtataacctgctggtgcgacacgaataagaaaactacatccaataacaactgcgatataaacggcccccataattttaaatgctgtcattacgttatacgtttcaattaagtagttagcaatcggtgcagcaataattgtcgctccgcccattccagctgtaataagtcctgaagcaagtccacgtttatctgggaaaagtcgaattgtgttgctaagacaccctgaatatgcaaaaccttgtccaagcccagcaaggacaccataagataagtaaagcattgtagtggaggtagcaaatcctgttaacgcaaaaccaagcccgaatagtatacctccaattaaaatagcccattttgctttccctttatccgttaaaatcccacctaaaatagttggaatcggtccaatcgccgcattaattgtaaatgccatcacaacttgcgggattgtccagccatgagcggcacttaacggtccagcaaatacactaaatgcatatactgcccccgtacaaagtagaacaccaacagaaccaattaagactccccaacggtttatttcttttgtcatatagatactccctctcgcgtttgtttttcaataatagcttttaagccgccccattcttcgctaaacataccgccatccattacttttaaatcgctcgcaataatgggttcgaattccatttgtccaagaatatctttttctaaatcaatccctggtgcgatttctgttagaaccattttgccattttctaagcgaaatacagcacgttctgtcacatagaggattgtttgattggtcgtagaagcatattcgccactaaatgtgatttgttgaacttgtttgataaactttttagcttttccttcttgtaaaatttctaatttcccggcagctacacgcgtttttaatccacctgctgtaaatgttccggcaaagattaatttcttcgctgattgagaaatattaataaatccaccacagccagcaactcttgatccaaacttgctgacattcacattacccgattcgtctgtttgtgccaaaccaagtacggataaatcgagtccgccaccatcgtaaaaatcgaactgcgaatgatgatcgacaatagcttcactgttataagcatgaccgaaatctgctaaacctgctggaacaccgccaacagaaccagcttccgttgttagtattaattgatcactcacgccctcttccgctgctacagttgatacattcaccggaattcctacacctaaatttaaaattgtttgtggttctagttctgctgctgaacgacgcgcaattactttacggtcatctaacggaagtggctcaatatctccaagcggaacttgaatgtgcccagaaaaagctggattgtactgcgtattttcagtttggaaatgattttctggttctgaaataataatatgatcaactaaaattcctggaactcttacatctttaggattaagcgatccttttttcgcaacagattctacttgtgcgataacaattccgcctgaatttcgaactgcctgtgcaattggtaatacttccatatgtaagccttctttttctaaagttaagttaccgaattcatccgctacagttccccgaataagtgctacttgaattggaaaacttggatagaatagccattcttcgttgtggatcgtcaatagctctactaagttatctttggaacttgcagacatttttgccccttcaatgcgtggatctacaaatgttcccatgccaatttttgtaatcactcctggcctcttagcagcaatttcacgatacagttgtgtaataacaccttgtggcagattgtatgcttcacatttgtcttcttcaattaatttcgccattttgggagaagcgattgcaattccaccaatccagcgtttaatcaatccttcatgtccccagtggctcattcctttttcccgacgatcaccaagcgcactagcatgcataactgtaagattacgcggagccccttcttctaaaaaacgcttttcaaccgcaatagccatttcttcattaacacaagctaaaccgaaaccactaaaagcaacagtatcgccatcctttaataattttgctgcttcactagcttttattacttttgacaaattcctcactccttattgttcaattattcacatatatttgtaatgatacgcagttctttataaagcaacttccgtgccaacatgaaaaatggctctataacacactttataatataaaacattatttattgtcgcaaaaaagagacgtcaaaatggttgtttttacaaacaggagtcgcgaaaacgcaacaaaaaaggtctaatcgcaacatccgattaggccttctatttaatgaagtgtttttagttttcgatataaaacagaacgatgaattccaagtgtactagcagcttttgtcacatttccattactttcttcgagcactcgcagtataaagtgtttttctacaccttgcaaataatctttcaaataaagtgagtctttttttgtttgttctttaaaatgtaagtctagtgcgaaatcatctgtttctgcaactgttacttctttatttccagacataacaactaatcgctcaatcttgtttctaagttcgcggacatttcctggccaattatgagaaagtaattctttcgttttatcgccacttaactgaaaatctttttggtacttttgattaaatttttgtatgaattgacgtgcaagaccaataatatcttgcggtcgctctcttagtgctggaatgtgaaccggcacaacattaatacgataatataaatcacgcctaaatgttcctttttcaaccatttctccaaggtttcgatttgtcgctgaaataagtctaaagcggcgtttcgtctcggttgttgagcccagtcttcttacctcgccagtttcaagcactcggagcattttcgcttgaagttctaacggcatttcagaaatttcatctaaaaacaatgtaccgccatcagctagctcaagcatcccgggtttttcaatatccgcaccggtaaatgagcctttttcatgtccgaaaagctcagattcaaatagtgcttttgggattgcggcacagttaatcgagataaaaggcccagcagcttgtttacttttttcatgaatatagcgcgacaagacttctttaccagtaccagactccccgtataataagactttactgtcaaacggagctatctggttgcacactcgaactatctgcttcatcgcgacgctctctgctactatcacagttccatcattttctttataatcttcaagaagaagtgactctttattgcccgaaattgcctcaccacgccatgttttaaaactatctggttgcgtttcatctgacatcgtaacaactaaatgcaccgtgccatctggatagagaattggtgtagaagtcgaacgaatactaaaacctttcttcgtattgatcacttttgttttcttttgttttgtgcggattgcttctagtgtgacagaatcattgtacacaccgtcttccactaagtctcttacattacaacgaagcaattcttcgagcgacattccaactgtaagcgcagtgaatttattagaaattagaatattcccatctgcatccgtgacaaaaagcgttgtcggcatatccttatttaattcgccaaatgactgtactcccagcaagttatccattaagtcaaacattaaaagctcatccttttggactagtttcctagttatttgctcatcattacacaatatattataacataagaaatctgccagaagtactcgtttttttgcgacagactaatttccgtctgcaatacatacttgatttcgcccagttaattttgctttatataaagcctcatccgcagatttaaataatccttcacttgtattagcgccatccttactgctgctaacccccacggaaatcgtaattttcaccacttgtccacttggtatcataaaatcgtattcttctgtttctctacgaacttgttcagcaaaaaaattccctttttcaatcgggcaatctaataagacaatggaaaattcttccccgccgtttctaaatgcctcagaaccgtctgatgtatttcgctttaaaataatagctaattgtttcaaaatagcatcaccagcgtcatgaccatatgtatcattaatatttttaaagtaatcaatatcaatcaacatgagcgtaacttgtctgctcccagcatccatcacatgatttattttttcatcaaattgtcttacattcgataatttagtcaaataatctagcgtggagtcctgctcatatttttggaaaagttgctttgatttaatcatgttgctcattagtcccgctgaaacagccccaataacaagcgcaataagtacgaaaacagtcatatttatccaaaaatgagactccctagctaaaatcaaatgcaggttaataacaacaaaactacacgcgatgatattcaaaataaaaacgccccaaattttgaatttctctatgcgtttgccaaaaattgctgttattatgccgattaacatcatcacaacagccgccataatagctgcggaattcacagataataaaaagcgcgatgctgaaatgataatagctgatacaatcgcgggaatcggcccaccataaaagcctaccattattattggaatgtgacgtaaatcgacaatcacattattcgaaattggaatcccgaaaaccatcagcgcaaaaccgagaagtccagcccaaattccgattactatttttttatttgttgataattcttttgtaattggttctttataaactaaggaaataatataaaagcctgcgagcaatatcgctgcattacttaccaactgttcgaccaaaaagcatccccgcctctcactttgttactcaataccccaatatgctcacaactattcatacgcataaagaaacaacctctgcaaaaatagacgctgtcccaaagctttattcttctattttctcaaaaaaagtccacaaaagaaaatgatttcctttgtggacgaaatttttattagtaagctgtccaacctgcatcggctgtgataactgtaccattaacaaaactagagtcatccgaagctaaaaatagcgcgactttggcaatttcagaagcatcgccagctcgggggttaatccccattccaatcatggcacgttcttggccgaattcatccggcgcataaatcgttgttccaatgtttgtatttacagctcctggcgcaattgcattacaacgaatgtttttattcgcatattggaatccgacatttttcgtaaagcccacgaccgcatgtttggaagcagtataagccgctcctgctcttgaaccaaatagtccgccagcagaagcaatgttaacaatcacaccttgtcctttttcttcaaagatatggagtgcttctcgagttgcgcgcatgacaccagttgtgtttatcgcaaacactttatcccaaagttcatctgttaattcaccagctggtacaaaattatccataattccagcattgttgactaaaatatctaatgttccaaatgcctcaatagcttggttaatcatattttcaatatcctcttgctttgttacattagctacgacggcaagcccagttccgtgttctttttcgactagttcgactgttttttgcgccgcctctaaattcaaatctgccactactacttttgcgccttctttagcaaaaagaatcgcaatttgttgccccattccagatgccgcaccagttactacggctacttttccatttaatttccccattgttatttcctccttcacttttgttccgctagaaaaagaaatcattccctttctatttttattataatcccggtataaaacgctttcaatatgtaaagaaagcctgttttgttgattaagcaacacttttgcgttatatgtatagtaataagaaaatttctcaaatgggaggttctaaatcatggatagacgggttaaaaaaacaaaaaaagccttcaatcaagccctcttcacactacttgaccaaaaaccctttcagcaaattacgattacggatattgtcacagaagcagatgtgaatcgcgggactttttataaacactatcgtgataaagaagaactgttagatagcatcattgaagaaattctgatggacttaaaaagtgcctatcaagatccttatttacatacaagtcatttttctattcaaacacttacaccatcaatgataaaaatatttgatcatgtgtatcatcatcaagccttttaccgccaagtaataaaatcgactattcggcccagttttcaaaatcaggtttgtgacgttattcgagagcttatattagatgatgttgcgagtttccctgatagttcagaagctaacctccaactactagccacttatcaagcgcatgcgatttttggaatgattgttttttgggcagaagaagatttttcgcattcgccagcatatatgtcggagcaattactttatattattcatgctaaaacacaacaagtgtaatccttacatatttgttatgttactttctagctttgtcacttgaatcgagggcgtgagctgttttcccttgttataatgaaagcatattagaaaggtgtgttgattatgaatgatcatcgaattttaaatgctttaagttattttagtatcttgtttgcaccaattattgtcccggtgctaatttggatatttgctaaatcagaagaagtttcgcatcatgctaaagttgctttattaactcatattattccgactatcgctggattcctttgtttctcaagtatttttgttacagctacgacaagtggcggcttactcgcaaatgtatcactatttgttactggtagtttgtttgtatttacattagttgctgttgtcggactatttatttttaacattgttcgcggcattcaaatgttatgtgaaaaaacagaagaagatatttggatttaatcaaaaaagtggctatcctttgtaggatagccactttttttaatcatttattttttttgattttctcaataagaatagtcccatgaagctagcgaataatccagtaaagattattccatatggagactcatctcctgttgaaggaagacttgtttttactgtaggtttcttcgccgggtctaccggtttagttggttttaccggtgtgactggtttatctggatttaccacgattggcgctttgtttttctcgtatacaaaggttactttttgttccgtttctttgaatacgccctctttgttcgtaggttgttttgttaatttataacctttgatatcttttgctttcgttgcatatttatcgccaacgatgccagtgtgaatttctttctctgctaatacattgccttttgtgtcaacaaattctgcgatgacttttccgctcacaactgtttttaggttcgtttttgttacttgcaacgtttctttttgatcgaaagtgattttcacatcaacaggaactgtatctaattcatagcctgctggtgcttttgtttcaatcaattgataatctccaggtgctaaattagttatttctagtttcccagatgcatccgtagttaagttttctgtaacattattatcttcatctactaatttgaacgttgcatttgcaagaagtgctttcgtctcaccatctgttttagttagtacaacagatccagtagacatcgtgtttgtttttgtcacttgaattggtgctttttggttgaactcgatggtgaattcaactggtgtagcatctaaatcataacctgttggagctttcgtttctactaattgataatcacctggtgccaagttatcaatttgcagttgaccatttgcttctgtcactactttgtctttcaaacttaccccaagttttgtttgtagttcaaattctgcaccagctaaattacttcttgatttactatctagcttagttaagaccacactaccagttttcgcaacattttctttagttacatttactgcagttgcttggttaaattcgatggtaaaggtaaccggtgttgcgtccaactcatagcctgttggtgcttttgtttcaacgaacttgtaatcacctggcgctaaatctgttacttctagcttaccatccgcattcgttgttaaattatcttttactttagttccagtggcattttgtaattcaaattctgctcctgataaagtagcttttgaaacactatcttctttcgttaaaactacactacccgttttcgctgtgttttcttttgtaacaattacagccgcttcttggttaaattcaaccgtaaatttcgttggcgccccatccaaaacatagccagttggcgcttttgtttctacaaattggtaatcgcctggcgctaagtccgttacttcgattttaccatctgcattagatactaagttatcagcaacttttgtaccgtctgcattttgcaattcgaattctgctcctgcgatagcatcttttgttgcgctatcttcttttaaaagaactacgctaccagtttgttctgtgttttcaatagtcacactcgtcgctatatcggcggtaaccgtgatttctttaccatctttgtattcatcactaattgtatatcctgttggtgcttctgtttcaacaagtttatattttccggattgaagaccatccataacgattttcccgtccgaatctgttgttgcctcttgccctgctttgtctccttcaagcgtataaagctggaatttggctcctgttagtttttttgaattatcctttttatcaactttggtaatttcaagtgaaccaattgtcgccgtcccgctaccactaccaatagtgaaggctggcgatatgcttgttgttcttgatttatacgtcattggtaaactaccgtagtcaggagaagcagttgtcgctgtgttactaactagcccggacattaagctgattgtactataggttactttaattggtgcagttgctttatagtctttgaattggatagtgaaattattgtctgtgtaagtgatgtcataatattttgagtcaatatcttcgcctgtcgtttcattcattactttaaagctactttttactacttgtgctccagttgttcctgttttcattgtatctgtaattgttgggttgttaataggacgatctgctgagatgttgttaagtgttacaatccagttaactttattatcaaaagatggatcgatcgtagctgttttggtcatcgcattaaaaagtttgcttgcgtatgcttggtaactatatgatttttcgcctactccattatcgctcaccttcgcagtgttttgtacgtaggagtagaaataccagttttcgtttggtttggtactgtatttaataaatacgcgtgaattctccaagttagcaaattctaaatgtaatttattcccagttgtatcgacttttgttggatagtttttgtcacctgttttggctactgttccaacagagttaagtgggatatatagattcatcatctcacttgtggaagccacattacgatattgtagtgaaccttctacgtatgttaagccagttggaatagcatcgtcaaaaatcaagttgtcgtagtttttcgccatagcatttacagatacaatccaatcgatattccccgtagttgaattgtatgatccgtacttaccaccatttgtcatcatgcctggatctggtgtcattgaagcagttacctcatcaacatacttgataatcccgccatcgtaataagaaatggatgctttattatcaattgtttttgttacatcagaaaggtcaatatctgtgacgaaatcaacaacaatttttttgtctgtcgaagcataatcgccgataagttggatataaaaaccagctggcgtcacatctttatcaatcgtataatctttgccttctgttagtaatacgctattggtattatctgtataggcgcggacagtgtaactcttgagggcttttaccccagtagaaaattcatccgtaatattaagattccccatcttaattctgtcggagttagcagtaattttccatgtcatcgtgttattaaaatagtcaattgttccagcttcttttttcagtaaatctggttgaatcgcgatcgttgcgtcagcggaaacaccattttcatctgtaatttcatttttaattttacgatcactaaagtcggtgattttcgtagaataagtgatttcatatgcgttggtattagtgtttttatacgttaaattaaaattcccatttgctgagattgctgaggttgtccaatcacttgaagcgtcacttccaacgattggcgacccgttagttgcgttaaaagttactcgtttaattttaagtgaatctgctacatattcgacatcgttatccgctaaaacatcggtaagcactgttgaaggagatatttcgtcttgatcaaagttaaagttaattttccaatcaatactttgtgttgagccgttgtaagtagcttttttctccagatgcttataattagtcatcgtcaggtaaacataagcagagttgcttgataatgtccctgcatcgcctactgtgtaagcttgtgtagacatgtaagaaagtgaatcacttggtttattgattgtacggtcatatgttacttggtagcctttcccagcaagcccaccgtttaacgtaacagttagagaagttgcggaataagttaacgtatagtccgtgccttctacaagtaattttttcgtaccaatgaaggttcccccagcactaacatcactcgaatatactttgatgctatctttatcaatagttgttgtgccaccggaagtataatcagtaagtttcagctcacctttagcatctttttcttttgttaagttgaacttggcatccacttgccctttagttggattcactaccccaggatttgctgtaattgctacagtagttggatagttaactactggtacaacttcaatttgataaatagtatctttcccagctgtcttgaaaacaacttcttgtatcgtttcttctgttgatgtaaatactttaaaagcggtactgatattcacatcataatcgccttcttgaataccatcttttaagaaagtaatcgtaagttcacgcgttgtaacatcaagtgaccattctgcttctgttgaaggcaagaagttcccacttaaatttttatttccaaagttgaaagcatctggtaaaacggtagtaaatgtatctcccgctttataatttttccctgaaaatgcaaagttcatgttaagcacaactccgctaccattttgaattcggtccgaagtattgatttcatcgccattgccgtctttcagtgttactttgttgaaaatattgtctgtaatagcagcttttagatttgcattttgtgttgcttttttaaccggtgttgctgcttcttttgttgtttcttcttgcactttcgctgaaacagaagtaatcacttcttctttttctgttaaagttacactatattctttttcatctagcgcgtagccttttgctgcaactttttctttaactagataatcaccaggtaaaagagaatccatagtcgcttcaccatttgcactgatggttaaatcacttgtttcacttgtttctttattctttatctcaaaggtagaaccattgattttttcttttgtatctttatcttctttgattatttttaatgttgtgtttgctgtttcatcgtctgtcattgtagctagtacaggtgaaacgttttggaatactagtaatcctataaccattgcaataactagcttcttccagtgtctgatatttttcactttgttttgtcctcctataatctatttctaactattgttaaatctctaatagacttgttgaattgtaacaaataaacgtactaaaaaatcacttttcatgaaaataaaaaacggtttgtgtcttttttgtgaccaaaagtaatcaaaagcactcataaacaattaaaaaacttgtataaatcaccttttcttcataatcacaaaagcacctgaaagcatgaaaagtccaatgataacccataaattagttgtagtagagtctcctgtatgtggaagttttgccaactttttcacgttttcagttcccttattagaagacgaaattgatagattgcttgtcctttcatacacataagttactgtctgtgaggtattcaaaaattttccagttgcattttttggagtctgatataatttataccctgagattttttttgatgaagttgtataacttgaatttaattttccgtttaagacaatcgaatcagctattttttcgccatttttatcaacataattgacaatgattcttcctgctgtcactttttgataaataaaagtaattgtctgtgctttttcgttaaatgttccacttacattagcaggtatttttacaagcgagtaattgttaatttttttctgttttgcagtaaatttttctccgtaagctcctgttaatgtttctgggcttgcaatttgtttgtggttttgatcaacatattgcaccgtaactggagcaacactatcatctaaagccactcctacttgggccggctcaattacttgagaattatttacagcaacagcaaaagaattccatgcagctctgtcttcttttttcgtttgttgctttaaaagagtcttatctatttggtttttctttggtgtttttaaatcaaattgaattttcatggatttcccaggaatccactcaataccttctttaagttctattttaaaagagtaaatatttgaccaatcttttacttctgacgctgttaaccaatctgcttgtgttgcttctgtgttatcgactaaaggctccgttcctattgggtaaatcgtgtgtttatcaagaatccctgcacgcttaggatttttagcagtactataagttacttcgactttatctttccattctttcggaacttctacagctttcgttaacgcaagattgaatttactaccacgttcgctgttatctgtaattcctaaatcattttcacttggtaaaacatccattaagaccatattagctattttttcatctgaatcattttccagtgacaattgatacgaaacaatggaatttgttgtggcatttgccagtccgctgtattctttatcgcgattacccttagcttttttactaattttcaaatgattactcgtatttaaaatgtaatgatttcccgatgtgattctagactcttccgaattcccattttgattaatgtcatttgaatcaatttccatttttgtatcagaaattgttggagttccactcacttctggcacattgaaatccgtgtcctgcaagaaaccaaacatctcaacagtcatattacttggtgtgtcttttgctacactcacattaatttttgccgttaatttttctgctggtaaaagcgtctttttatcccatttcactttgagtagttgacgtcctgcgttttggtaattctcgttcaacacagttactttaaagccattttgctccgtgtttttcattttgaccccagaaggtaataaaaccattgcttcaaaaggaccttttaatcgtgaaatagaagctttattgctttctaaattaacagaaatagaattatcacctatgttgattaaattcccatcggtatcatcaaacacaactgatccttgtacaaatttatttttaccagtaggttgcggaatgatttgcgctgttcggtctcctgcataatttttccaagcttccggccaaggattggtatcgtcataataatggatatagtcttgactatccgctccgtacatgttgatttgtgtactattcctaacctcgcctacataaccttctttgactgttgtaaagaaagatagatcagcagcatacattccagctggtgcatacgtgaaatgaagccatactttactcacatgtttatcatctggaattccaagatcttttctcgaatacattttgctcagttctacatcttcttttaacgtagtccagtcagtatccccatcatattttacgagtaaattgtatttaggggattttttcaactgagcccaacctgggtaattaacatttggtttaaaataaaaatcgccactccggaagtaatccaaatttaaattatcatcaatattgtagtaagcatcataataaaggaagtcgtaccaaggtgagtcattcattgccgaatttaacatcaaactaaagcctaatttagcagtatcatatacttttatatcaggatttccggtcacagtagcgattccccaattcgcatccaccggtcctctgtgtgctggagcataaacacttccaatagttggcgggattgtcgctggatcacttgctgaaactgaaacagatgctttggatgtatctacaatgctatcagtcaaagtaacaaagttcgttgttgcaacagctttattttccaccgttgcaaaattcggtatagtaggttggaagaacgttctaatttggaaagtcttgttaagtaaactgtttgctttttcttgttccaaatatgtaggtgctgcaatttcccaagttagtttttgtccttcgaccttcgttggttctggtgtatctcctgctacacctaagtaatctagcttatctgctaatgtatactcaataacaattttcttaccttcttccataaaaaggcttcctgtagactttttcggaatatttaggttgaaagaccaaatcccgatgtcaccttgactcggattattattgatgctattttctaccttagtaaaatcatttgataaagctgttgtggctgttgcgttgacagttgtttcagcttgttcagttactttttcagataaattatctgcgcttaattcacctgttactactaatttcgttccatttggtgtgtaaccatttttcgtagtcatcttgagaatcactttatcaactacaccactgtttagtgtttgatatgtgtaaacgagctgacgagttgttttgttataacttggtgttgctcccgcaatcttaagttcatttagtgattgattaaattccccattttttggtaaattgattaccaatttagcattttggtaccttgtgtttggtccagtgatttttaaataaatattatagtttaccgtctgaccagattcaatcacgtctttttgagaattaatactgaagtcccctgaataattcccagttggaaatgattttgcgtttattgctttatttactgtggtcccttttaaaggctctgaagtagtctcatttgaagtcgtttcctgcgtaaccttttctttcgtagttatttcttctacgtccgttccatccctttcttgactatctgcccaaaccgaaaatggaagaagtgaaactatcagcaaagtacaaattaatatagatactaattttttcaaatgattcacattcgcccctcctttgtttactcaagattaattatttcataggaggaagtggctaaatgttctcaaggtacaaaaaacaggacagtttgttacggaaatgtgaactattttacgtttatattcacataaatgccattattaacaaaaaataaccaaaatcattaaataaattcaacgattttggttattttatttatcttattcgaatcgattcgctttcaactaatctagcaccctttacttcctcaccagattttagtatctctgcaattcgctttttatcaattttaggttcttgtagtaaaaagaacggttttagcaaagcttcttccactatttccacacttggtggattcttttgtatttgaattgtaaaaagtgtactgtttatttttctaatttccattcgttccatctctgtttgtaaatagttttttaaattttgaacattattttctagcgcttgttttcgttttaaaagtcgtttcgcttctattcctgccatttcagcatcagcagctaaagacttaataattttaacaatattctctgatttatcatgaaaactatcagtaagcgcatctaacgtatctttcacagcatcagtattattttcttccaaaaattcttgtacttttaaataattatcggttagttcatataatttcatcgttcgcaccctttccaaaaaaggaaaaagcgccaaaagctattatattttggtgctttctcattttgttactaattttccttgaataaccatacgtcctttttcataatctttttctgtatcgcaagttgaaagtgttataattcggtcctttccactgacttttacatttgatgtatacacagattgttgttttactttttgcaaataatcctcaaaatccgttgtttccggaaattctgtttcaatgtagtaaaaatccgtcgtcgtttcatacacagcaaagatttccacttcataattcgttaagcccgattcataggaaaacgttggatgtgccaccaaaaaatctttgtccaagtatttacgtaaatccgcaaacatggatccgtccttcatattatgaccataaataatcgtatttttatccaaaaactcattcgtattccgataatctttaaaaatactgcccgcgcgcgccttttcatttttataattgtggtgtaaatagtaatcattatccttactttgcaaaatcggataatctatttccgtatctataatcgtcagccacccaaccatatctttatttaacttttgcaaatctctaagttcatctcgtacttcaccattcacatttgtagtagcggcatcctttgtgtaaacagctttcgcatcatctagaatcgtctggttatgcttattttcatacagttccataccaattttccatccagaaaaaagaaaaacccctaacacaaccaaggtcaaacttttccccaaaaacgattttattttcactctctaaaactcctttcgtctttgaggaacaatgtatttcccgttgttcgcatcgtttaaaacatctgcaactacaccataagtttcagcaatcaaatctgttgttagtaattcttctggttctccttttgcaaccacttccccatttttcatcacaatcaaatggtcactatacatcagtgcttggtttaagtcatgcaaaatcattacaatagtcaaattttcttcttgatttaatcgtttcactaattctaaaatttctagttgaaaatacatgtctagaaatgtcgtgggctcgtccaacagcaaaataggtgtatcctgaactaatgctgttgctataaaaacacgttgccgctctcctccagaaagactatcaacaaatttctctgctttttcagttagctccgtttgcatcaaagcccgctcaacagctagatcatcctccttcgtccgagtcattcgccaatttttataaggtagacgaccaaagtaaagcaattccttcaccattagttcattcggaagaacattactttgatgaacaatcgccacattttgcgcaaattcttttgctttccattcaaaaatcgattttccttccagtaaaacatccccagaattaggtgaaaggagtctagccaaaatttctaataaggtagattttccactaccatttggcccaacaatcgtattgattttatttttctggatagtaaatgagacatttttcaaaattgcatcggttccattataactaaaattaacgtcccttacttccataaaaatcaccctttcgcattaaaaagattaagaacggaccaccaataataagcataatcacagacgcagggatttccatttgttgaaataacgttctgcctatagtatccgcgaaaagtagcaataaagccccaaataatatcgaaaacggcacaagtatttgataatttccaccaactagttttcttgcaatatgtggtacaagtaaaccaacaaaagcaataacacccactactgccgtggtaatcgatgcaaggagtacagcaatcaacgctagccatatccgcgttttattaactggcacaccgaatcctctagccattttattttcaagacctaacacattgcaccatttagcaagtaagagcgcacaaatcagtccaatcgttacatatattaataaagtttccacatcagaccattttttcattgccaaactcgctgcactactggcagattgactagaaacaagcgccacttgcgaagataatgcatcactcaatcctgtaaaaactgcatttattgcaataccaataataataaaacgaagcggattaaaatcagagcgataactaaacaaaaagactagaaaacaagcaagcgcaccaccaataaaagaaaaaagcggcaaccaaaaatacaattctggtaaaaataaaatgatgacaaaactaaaaaatttagctccagctgaaatcccaatcacaccagcatcagcaagcggattccgcattacagcttgtaacaacaaaccagaaaccgaaagcgccgcaccagcaagaagggcaataataattcgcggaaagcgcaaatcaataacgacatccaccatttcatttccaccactaaatatcccacttaaaaaagctgggatggacatcgacaaactccccgcttgaactgcccacaaaatagtcccaatcaataaaacaatcacagcgccaaaagaacttttttgcttaattgtcataaagcatcttttccatttcctttagtgcttctggcgcattcaaacttgctgtcataccaaataaattttcatccaaatcatacacacggttatttttcaccgcatcaaaatgtttccaaatatcatttgttttaaattcttcgtcaaacattttaaccacttccgcaggcataccatgagccgctcgcaaaataatatctggattagcgctttgtaagtattctgtattagaagctaaatattctactttttggtccttaataacattttctcccccagcaagtttgaccaaatcgccaatgtacgcgtgttctgttacaactaagtaacttcccggaacccccataagaatgagtacagtcggctttttctttttcgccacattcgacttcacctgatcaatatcacttgttaaatctttgtttaatttagttgcttcttctatacgatcaaatttggccccaagatttttaatttccgtttgcattgaagcaatactcgtaaaatctaaaaaatccgcttctaaatctgccccttcaaaaccactcttcaagtccgcttctagcgtttttgttgaaaggaccatgtctggcttcaacatccgaataatttccaaatcaggccccataggcgacccagtttcctttacatcagcataacgtttcggaagtttttttgaactagacggaattccaacgaggggcaaatcaagtttatccataatttccgtaatcgcaaccgtcgttgccacaatttttggctctttatccgttttttgttcaggcttttgagccgcttcttcctttccgcagccaactaaaaaaagcaataacactaaagatatgacagccattttcctcatcactaattcccccatttataaaataaaatcggtaaagcgagttaagcaaaggataaccccgacctaactcgcttttactagttttattaactcaatcttttacgttttaatcgataagctaaataaaggaaggatgctccaaataatgtaatataccataccatacttgatgaatcattcgtctttgcatttttttctgtcttacttgctgttttttgaacagaatttgtatcatcaaaatccggttttgccaattttggtccagcattattgttactcgctacattaccagtatttaaaatatcttttttcacaggttcctttaacgttacatctttccctgtaatgtctttaatcgttgctgcatttagttttacttgaacagtatactcatggtcataagaaaaacctggcatatcttcaattaatacatgcgtttttacatctgtattagccgtaccatctttcacaggatacttgacggttctcgtatttttgttgatatctccggaaacaacttccatatctttccaaacaccatttactttatactggaaggttttaatccaactactgtttgttaaagttaaataaacatagggttggttattttcaactttgattaaagctggcttcatcacatagctttccatcatggaagtttctgttgttccatctttaaatacatcaaaatcaatcgagtacgtatggttgttcagtagatttttcggatcaactactgccggtttacttggtgttgttggcggtgttgtcacaggtggattcgttgtacctggatcaggctttgtcactggtgggtttgtttcaccaggatttactacaggaggcgtttcgtcactacctgggtatgaacttgctgcagttgctttcgctgtgtcaaaaacataacggaagtctgcttgtcctttgtatacagaaccattgaaaggcgcttcataattaacatgagccgcaagtggttgatttaagtcctccacttcaaactccacaatacgtgtattagcatctttatcttcagaaacaacttttacatcttgtaaagttccagcaagagttgtttttaaagctgttactgttttattatcattaactgtcattgctaccattttcttaccatttttcactttcaaccaagcaggattgttaaaataattttgcatgcttgaattgctatcatcatttgcttttttcgctacaaacggaatcgtataaattccatccgaaagagtcacaggtgttgtaacagcaggttctgagatgactttgaaagtacttggatcaatagttaaatccacttgataccagtgatcataactaattgcatctaccttaatatgcatataggagaaaataacatcatctaaagaactaagcttgaatttctctacacgcgtatcttttgctgcatcagtgctcactgtttgaacatcttcataacggtcttggtaaacatccgcttgtgcgggtttttcaggacgagttccattttttgaaaccgccattgtttgccaccaagtactatttgtaattgttaagtacatataaggttgaccattttccactttaatcgttgctgtatggtcaatatatttatctgcttctgaagattctttcgttgtcttaccagtattatctttataaaaattcacttgaacttggtattccccgccatctttcagacgagaatcagccgcgctggcaaatccaggtatcaattgaaaaataagtgtcaaagctaagaaagctactaagccttttttccataatttcttcattataatccccctttttatttaaaaatcgcacgtcttttaagtaaaattaaccctgccccagttgcaacaaaaataattccgtataaaaacatttggctagaatcactagactttggatttgttactttattacttgaatcactctttgttgcgggtgttgttgtattattatcagaagatttcaccgctccagctaatgcttttgcagatccttcatcgaaacgtaacttgatttgatattcatgatgataattcaagtcgtcatcatcaatatccactttaattttcgcattaacaggattgcttaaagtcgacacaggaaacgaaacttttctagtgtcacttgatgcatttttcgaagtcacactaaccgcgttcccttcaacccataggcccgtaatccacttactatggttcacttgcaagctaacagttgatttccccccatttactgttaccgttgcaggtttatcaaaatagtcattcgccatagatgcggaatcactatccccttgtatcaccgtataatcaaccgaataggttccatccttaagtgcggcttgtgccgttaatccagtagaaagaaacgaaaaactgaataaaacgataaaagcagcaaaaactaaaactttcttcattcttaaatctcccttctttaataaaaactactatttataaaaaacccccacaaacacaagtggagtaaaagtttatgtaaaagtatacgttaattatcattttaattgataatgattatcattgtcaacaacagattatttttttactaattaaatactcaaaaaaaccatgaatagcaactcctatccatggataataattatttcctattactcttctatttgagaaaagcgatcatataatagttccccttttaacgttaaagtatatcgtttttctgcaatattattatttctaattaaaaaaccattctcctctaaccaataaagagttaataacacttcattttttgtatagtcccgcaaattcccaaaatcaatgacctcaagcgacatatcattaattttcgtatccacacttctggcaaaaagaagaacttctcgtagtaatctttcatcttcaaattccatctttagtcctcctttaattctgagttagtatcgtaataacgtaaaaagccgtagcaaaatgccacggcttcttacagcgcaatcaaaaggagaaattcacacaatcaaataaagggggtatttgtttgtgatttatttcacggttataatataccatataaacgcttataattcaatagttcacatacctatttttatttgtttattccatgaatactgacaccacttattcatacgaaaaaaaagacacgcagccattattgctactgtgtctttttttagtaaatttcacaatgtgttatttaaccagctcttccaattcatccaatttttgttcaaatacctttaatgcatcatctacgggattaggggtcgccatatcgacacctgcttttttcaacacatcgataggataatccgaacttcctgctttcaagaaatcaatataggctgttacagcatcttgaccttctgttaaaattttcgcacttaatgcagatgctgctgaaaaaccagtcgcatattggaacacataataattcatataaaaatgcggaatccgagaccattcataaccaatttcagcatcataaaccatcgcttctccgtaatatttcttgttaatatcaaaatatgtttccgtcaagaaatccgcagtcaaagccactccttgttgatccgcttgatgaatggcatgttcaaattcagcaaattgcgtttgacggaatacagtacccttgaatccatccaaatagtgattcaacaagtatgcacgaacttttggatcatcatatttcttaagcagataatcagttagtaaattttcattcgtagtcgaagcaacctccgctaagaaaatcgaataatcaccataaacaaatggttgattttttcttgtataataactatgcacactatgtcctaattcatgtgcaagcgtgtaaacattattaatattatcttgccaattgagtaaaatataaggattcgtactatatgaaccagaagaataggctccactacgtttccctttattttccatcacatcaatccaacgactatcaaatgcctcttttaaaatcgcttgatattcatcaccaagtggtttcagcgcctcaagcacgagttcttttgcttcctcataagtgaactccaaattaacatcatcagaaagtggcgtataaaggtcatacatatgcaattcttctaagccaagtaattccttacgtaacttcacataacgatgaagcaaacttgcattagcattcactgatttcaacaatgagtcatatactgtttcaggaatatgattaccagagagagccgcttcacgagccgatgtataccctcgcgtagaagcataaaaattagattttttcacttgtccatttaaagtagatgctaatgtgttttttaatccttcataaactgaatacacaccatgaaatgcatcacgacgcactcgtggatcattactttctaacaatttcccaaaacggccatgagtaatttcgatatcttccccattttcatctttaatagttggaaacttcatatcagcattattcaaggtattaaaagtattggacgaacttccaagcacttcacctgcattagctagtaaagcctcttccttctcactcaaaatataaggtcgacttaaatttaactcttccaacaaatgatcatataattgtaaatctttattctcatctaaaaattgttttagaacattttcatccatagctaaaatttctgggtcatagtaagagagtgcagacattagctttgtaactaggcttcctgcacgactatgtaaaccttgatatttcgcattagctgtatcttggtccattttcaaatgagcatatacatataagttactaatcaaatcatatgctttatctcgaaattgaagtgcttcataaagtgtttggctactttccgataaacgacctttaaattggtcgctttcctctgtgattttttgcaaatccgtaaatgctttttcccatgcttcatcattcggataaatcgtagtcaaatcccaagttagattttctggtacttcttctcttaaaggtaatgcatttgttttactcaatattaaaacccccaaccatagtcattttgtttttattatgagccaaaataactaaaaaagcaaaacagatgattatatatgtgctgctcgaatattagtaaaagccattttccgtttcacacgatatcgattatctggtatggtagataacaccccttcaccaattaaataagaaagatatgactttcctaacttcaaactttcatttggagataaccaaatagttaatatctgacttacaactgatttgaaactctctaaaaaactttccacactaaaggtatctcccttctctagacctttaaaaaacttttcccacaaatcaaattgccattcaacagcaggtgtcaaaactaaaaattgttcttctacatccaccccaatttctttcggtaaatagtgtaaataatagcctgcattaaacaatttttgcataaactggccatgttttttatatttagcatagtaaaaacaaattttttgtctttctatttccctatctcgtttaatgtaggcgtgacgcgaaataattctagctaacttcttattccattccctcaaaggcgacttcatagaaaacttcatttcgcttgcgaaaaaacgattccctttttcaaatgttagatgataataaagcgtgcaaatttcacgcttagcagaatagtgccaaaaatgataacccaatttcttatcagattgaataaaggcttgttggaatgcagaaagacaaatacgccccttctccttcttaactacttgcccgagtatccagtgaacttccaagccaattgataagtagtccattgtgcgttgaatcatttcactaattgaaatagaagaacgctgaaattcaattactgtctttccattcacaaaaatatctgcttgtcgattaatttccggaaagtaactttctatttcaacagggatacgctgataacaaaaccaggccatgatttgctttttagcggctaaatgttcctcactttctccttcagaagcaaacgcacacttcattgtcttctcgtgggcaaagtgcggtatttttatctgtcctgcttttatcattactgggcttgcacacgatttacaaaacagtctttcttcttgcttgattcgttccacattcatcttagtaatagtaaaagtttctccaatgttatttctggctgtaaaaataattatcactctcctattagctctttaatattattattcgccaaggagcatccaaattcctttcttatttttaaaatcacaaaaaagacccgtttggctatttttcagcacatacgggtctttaaaataatgttttagaagtgttttctaatttgctttaatgcaggaacgtcaaagattacttttccgtactcagctagcatataaccagttaaattcgactctaaaccgtactcaagcaaaatactaacggcattgtcaatgttagattcatcatatttattctcaggaaattctacattcaaataatactttccttgatacgagtatagcttagttactaaattttcaagtcctgttgctcgtgaaagagaaatagcatcttcaaaatcacggaactctaaaataaactctagcgtatcatcttctccaagtgcttctttcttcactggattgaagttttcttcgagtagtttttcgattttttcttctgcaagctcatctggcgagctaagcgtgacatcgaagccatcttcgccttttccaccaattgtagcttttgttacgaatacttctaaaccatgttttaaggcttggacttgtatccagagcggaccttctggagagaactcttcttcatatttcagctcatccatcatatcccagaaaagttcttcacttttctcgcgatcataccaaacatcttcttggttaaaacctcgctcttccaaatccagataagagatataaaacttgattgtatcctcattaattcgttcaatttccatcgtcacactctcccttccttcttagtcattgacaatgaagggtaaaacttaattggttaaattcattgtagctcatattaagaaatagtaccaccatttttccttcaatttactaggtggaatcttatcttagctgaaaagcgaaaaaatttcaagaacatttacttaaactacaaaaaaagcgccaagaatccaattgaatggaatccttggcaaccacttttatcaatcttagttaaccattttttgcgcttcacgtagttgatacgtacgtacacggcgcggtaagaaacggcgaatttcatcttcattgtacccaacttgcaaacgtttttcatcaataatgataggacgtcttaataagccagggtttttctggattaattcaaatagttgttgcaaaggaagactatctaaatccacgttcaacttttggaacgtttttgaacgagtggaaataatttcatctgtaccatcctcagtcatacgaagaatttctttaatttcatccaaactaagtggctcagaaaaaatgtttctttccttataagggatatcatgttcttccaaccatgcacgagcttttcggcaagatgtgcaactaggtgaagtgtataacgttaccattagacattcacactccttatcgggtattgtttcattcatataacgaaattctagcaatatctctatttggaaaattcattaaagaacttacacttcattatacactaattttgtgaaattccatatactattttcaaaaattttctttccaaatatgtaaaaccattgttagcaagccgttatgtatatgatacccctactataacttgtttaaactaaaatcacatgaaaaaaatagcttttttatgagaatttcatgagaattttaattttaagaaaaaacatcaaccaaatttaactctgattgatgttttcattttatttcgcagcagcttcagcagttaacttagcatgcttttctttatacataacttcttcttcttctgaacaataaacaaaatgtccaggagcaatctcgcgcattttaatttcatcgccatctttatagttatgagacgtcggatcatatgttttacgcacacgagtacgttcataatttggatctggcaaaggaatcgcggataaaagtgattccgtataagggtgtagcggtgcatgatataaatcattggcaggcgctaactctactaatttaccgaagtacattacaccaatacgatcactaatgtacttaaccattgataaatcatgggcaatgaataggtaagttagatttttttctttttgtaattgacgtaataagtttactacttgcgcttggatagatacatctagagcggaaataggctcatcggcaataataaattctggttgaacagcaagcgcacgagcgataccaatacgttgacgttgaccgccggaaaactcatgtgggtaacgaccagcatgttctttacttaatccaactgtttctaacaaatcgtatacttgtttattcgtttcttcaggcgttttagcaaggccatgaatacgaataccttcagcaatgatatctttaactttcatacgtggatttaaagacgcgtatggatcttggaaaatcatttgcattttacgacggaattcaagcatttctttacggcttttacgtgcgtgcacatctttaccgttataaataacttctccaccagttgcatcgtataaacgaatgatagtacgtccagttgtagatttaccacaaccagattcacctactaaaccaagtgtttcacctttataaatatcaaaagaaatatcatcaacagcacgtacttcacttgcagtacctttgttaaagtattgctttagattatgaatttctaataatttttctctttgttcagtcattctacctctacccctttcgcatggacagcttgcatgccaggatgaagttccgcaaactgctcttggcgacgtaatacagcatcaggaggcgttacttcaggtgcatcaggatgaagcaaccatgtagccgcataatgtgtatcagacaccttaaatagtggtggctcttcttcaaggtcaatttgcattgcgtatttattacgtgcagcaaatgcgtccccttttggaggatgaagtaaatcaggtggcgtacctggaataacaaataattcttcatcatctgtatccaaagtaggcatagaactaattaatccccatgtataaggatgttgtggattatagaaaatttcatcaactgtcccgatttcaacaattttaccaccgtacataacagctacacggtctgcaacgtttgctacaacaccaagatcatgggtaataaagataatcgacgtatcaatttttttctgtaagtccttcattaaatctaaaatttgcgcttggatggttacatctagcgctgttgttggctcatctgcaataagaatttgtgggttacatgcaagtgaaatcgcgataacaacccgttgacgcatcccaccagaaaattggtgaggatattgtttaattcgttcttctgcattggcaataccaactaattgaagcaaacgaagcgctgttttatgtgcttcatgtttactgattttttggtgcttaataagtggttcagaaatttgtttaccaattgtcatcgtaggatttaatgatgtcattggatcttggaaaatcatagctatatctttcccacgaattttttgcatttgtttttcgtgagctttagcgatatccattccgttaaataaaatttggccacttttaatttctgagttaccttctggaagtaaacgcataatcgattttgtcgttactgatttacctgaaccagattcgccaacaatcgctaaggtttcccctttatataagtcaaaattaactccacgaatcgcctttacttctccggcatatgtgtggaatgaaatatttaaatctttaacttctaatagcttttccatttttcctcacctctcttttaatcgcgcattttaggatcaaaggcatcacgcaagccatctgcaattaagttaaatgcaatcatgatgatacaaagtacaatacatggatacagaatcatatatggcaatacttgtaatgttttatatccatcatttaccaagacaccaagagacgctgctggcgctggaagaccaagcccaataaagcttaaaaaggcttcaaagaaaatcgcactaggaatactaaacatgatgttaatgataataatcccagaaatatttggtattaaatgttttataagaatttttggagtagattcccctaaagtcatggaagccataacaaattcttgatttttaagttttaaaacttgtcccctgactacccgggccatcgttatccaactcgtcattgcgattgctatgataatagatacaatacctggttcgagtattaacatcattaaaataaccacaactaagtttggaattgcaccaataacctctaatacacgttgcatgaaattatctacacgacctccaacataaccggaaatcaaaccataagcaaccccaattacaaggtcacaaagcgctgctacaacagcaataataagagatacacgtgtaccagcccaaatacgagcaaattggtcacgtccaagcgtatcactacctaaccaatagtaagtaccctctttaatattattttgtttataaatatcaacgtcttctccaccaatagattgatgaccattccagaaaggcatattttcaaagccttgaacttttggaggaagactcgcattttcagtaatttgtcggttaatattatgttctggtcctagattttgtgataaataagggccaacaattgccataataataacaagtgctaatacaattagagaaactaaagccgctttatttttacgaatacgaagccaagagtcttgcaagaaagttaaacttggacgattaattttctctgcttccgcatccagaatgtgtgctggctgaaatctttcttttgcaattttatgttctgccattattttctacctccagacacacggattcgaggatcaatcaatccgtaaagaatatccactaccaagataacaaataccaacatgacagcaaataaaattgtagttcccataataactggatagtcatttgtttgaatagaagaaacgaattgactaccaataccaggaatactataaatattttcaataactagggaaccagtcatcagtgcgactgataatggtcctaaaactgtaattaaaggaataagtgcattacgaatcgcatgtttaactgctacttccgttctactattccctttcgctttggcaagtagaacatagtcagatgcgaatacatcaattaactctgttctcatgaaacgagctgccgttgcaagtgggaacatcgcaagtgcgaatgctggcagaatagtatctgcaaacgtcccccaacctgctactgggaaaatttgaagttttgctccaagccagtattgtaaaacagtcgcaaatacgaaagatggaactgacttacctaatattgctataaatgtactcgtataatccggccacctattctgatacatggccgctattacccctagtaaaataccaaaaataacaccaaaagccattgcctcgagtgctaattggacagatggaccaatcagtgcacttaaaatctcagacactggtctattatcaagttggaaggaaacacctaagtcaccttttaccaaacctgtcatataattaaagtattggactggaattgaatcatttagtccatatttttcattcatcatgtgaatttgttcgtcagatagtttctcctgattacggtaaggcgtaccaggtaagaatttcataagaacaaacgtaaccgaagcaatgatgaataacgttataagcatatataatactctttttaacgtatatttaaccatctatctctacacctcccagttttaattaatatataaaaaaagttattcctaaccaaattcgcaagtttagtgagcctttttctacatttctaaacttttattgcattagtgcaaattagttaggaaaaaaacttcatttttcgaatgttaggtttctagaagactagaaaaggatactttaatttttaattataacacatgaaaatcatcagcaaaaggagagagcatatcgaaatatactctctctttccgtcaagcatttcttaaagactaatattttatttagtcaagtatgtttctttgtaagtgtaatctggaccaaatggatttttttgcaagtttttaatgtagtctttttgtaggtatgcagtagaacgttgataaagtggttgaatagctacatcatccgtaagaaggattttttctgctttaaccatttcatcccaacgtttttgatcgtcagctgcataagttacagaagcatcatttaaaatcttgtcgtagtctttgttagaataactcattctgttttgtgcaccatcagttacgaatagatctaagaaagtagatggatcttgatagtcaggaccccagccgctcatagagaaatcgtaatcttggttttggtcattttgtaaacgaactttgaatggtacgtttttaagtttaactgtaagaccatctaagttcttttgtagttggtcttgaatgaattcagaagattttctcgcattttcagtatcatcactagtgaattcaactgtaatttcgttaactcctaattctttcaaaccagctttccatgctttttgagcttcttttacatcatattctaaatgtttgccagattcttttgtataatcttctttgttacctgggtcaaaagtgaaaccttctggtacaagattgtttgcaggtttagatccgtttttaagaactgtatcagtatacgattgtttgtcaatcgcaagagctatagctttacggatgtttttgttagcaaatactgtgtctttgccagcacgtttttggttaaatttaatatagaaagtagaagaatcattcactgtaacatagtctttattgtttttgttttgagcagcatagtctgcactcaatacagtacggtcaactttgtcagtgttgtataagttaagtccagtaccggagtcttgaacaacttgtacgttgatttgtttcaacttaactttatctttatcccaatatttatcattttttacgtaagtccattttttgtttgttccagtccaatctttcaactcgaaaggtccattgaataacatgttatcactattttgtgcatatttttcgcctttttccgtaacgaatttttcgttaagtgggaagaaagttgggaatgcgaatagtgagttaatgtaagcagttggtttagaaagagtaacttctaaagtataatcatctactgctttaattcctaattcttcaggttttttcttgccagctacgatatctccaccgtttttgattgcatcaaataggtaagaatatgttgcagcagtgttagggtcaactgcacgacgccatgagtaaacatagtcatttgcagttacagggtctccgtttgaccattttgcatcttcacgaagtttgatagtataaactgttttgtcatcgctaatttttggctcttcagcagcaccggcaatggcaggaataccatctttgtcaagcgcatatagaccttcgtttgtttggtttacaacgttcaaaccaacttggtcatccgcttttgtgctgtctgcagaaggaattagtgcgctttctgtcaagttaagtacttgctctcctgaagcttttcctgaatctgagccttttttgtcggatttggaatctgatccgcctccgcatgctaccaagactaagcttagtaatagtgttaatccaagtgtaagaaataatttagattttttcactaagtagacctcccttttttatttttctgaaaaattgtttcgatacctattatactctaagaattctggctttgtaaattatttttacaagataaatgaaaacaaggatgaaagatacaagttattaaaatattaaggcaaaattgaaattgcgtgaaaactctgaacagaaagtgttacgcaatcctctattttgcaataaatcgaattaattatgtatactttgctaaaccttttgattaagttttcagaaaacataaccatttaaattgataaatttacgatgaactttgccaattaagttaaaactggaagaagttatcttttttgtataaaagaaaatatcgaacccctttaaaatttaaaggattattatatttatatactttttttgagctgttgtctagataaaaatatcaaaaatttaattaaattttgtaataaattcgaaaaacgttgatataaagggatttttctgttaataatctgtaaagacacttggcggaatattttactaaaaacggacaaatttctaacattggatgatagcttccttctatcatatagtctttctatgcaaattgtgatagagtgaattatgaattttaattagaggtgaagaaatgtttttacgaattactatttatacacttattcaagaagctattatttttggtattttactcttcggaaaaaatcagactgttagtttaagcaactatgtggatatttcctttatggtagcgcttatctcactactaattggattgtttgtttatattatgagaagtgggtttttagaccgggttcataatggttttcgaagtatttctcgcaaaattaaacgagaagaagaaaatgagttttcagatatgcctttatctgaattagtcggcctgcaatacgccggaattttgtttagttccatttttgttatgttgactagtattttatgtatgtttttgtgattgacaagccgttttgtaaactgatagaatgaaagtaatataactgatgcgttaataggaagattagtacattttgttgctttataatagagagtctgtggttggtggaaacagataaagcgcaaaatcgaatggacttctaaggactgtttgtgaaagcgagtagcgaacagcggctaaagaccgttacttctttaatagaaactttctattgctaagagcctttttaggtacttagggtggcaccgcggataaccgttcgtccctaacatttatatgttgggatggacggttttttattttcgcaatcagtgaaaaaattggaggaataatcatgaaaaaagtaatattttccggaattcaacctagtggacaattaactttaggaaattatattggggctttaaaacagtttgggcagtttcaagatgaatatgaatgtttttattgtatcgttgacgaacatgctattacggttccacaagatagattaaaacttcgcgagcaaacaagaagtttagcagctctttatttagcagttggactggatcctgaaaaatccactctatttattcaatctgaagtggcggcacatgcgcaagcggcatggattttacaatgtaacgtctatattggtgaattggagcgtatgacacaatttaaagacaaatcagctggtaaagcaggagtgagcgccggactattaacctatccaccattaatggctgctgatattttactttatcaaacagatttagttccagttggtgaggatcaaaaacaacatatcgaattaactcgcgacttagctgaacgatttaataaaaagcatgcagatattttcacgatgccagaagtattcattcctaaacaaggcgcacgagtaatgtccttacaagatccaacgaaaaaaatgagtaaatctgatgccaatttgaaaaatgctatctttttacttgatccaccagcaactattagaaaaaaaatcaaaagcgctgtgaccgattctagtggtattattgaatataataaagaagaaaagcccggcgtatctaatttgctaactatctattcggttattaccggcgaaacaattgctagtatagaagaaaaatatgttggaaaaggctatggtgatttcaaaacagatttagctgaattagttgtttctgaacttgagccaattcaagaaagatactatgcttatctcaaatctgaggagctggacactatattagatgcaggagcagaaaaagcagctcgcgtggctaataaaacattgaagaaaatggaaaatggcgttgggcttggccgtaaacgcagaaaataatataaaaaaagccaatgacctagttaatctaagtcatcggctttttttatttaatcattaacctactttaatttccacatcgatgttaccacgagttgctttagaatatggacatacttcatgtgctttttttagtagagcttctgttttttctttgtcttggccttcgatagttccttctaatacgacaccaattttaaatccgttgtcttctggatcactatataagctgacagttgctgttactgtgctctttgcttcaatcccagcttttcctagaactaattctaacgcgctattgaaacaagctccgtatccagccgcaaatagttgttcagggtttgttccaccgccgccgtctccaccaagttctgttggcgcagaaatatcaaagtaaaatacgttgtctggcgaatgaacttcaccacttcttccacctgtattaatgactgttgtttcatataattttttcattttctattcctcctaattgttttgttaacgattgtattttggtaagtaattgtgtgtagtctaattctgcaaaatcgagtaattgaaggcagttgtccacgctttttaatacgtcaggttgtatttttattgctttttctgttaggcgaatataaacgcggcgctcgtcttccggatgacgactccgtgtaacatatcctaaatgctccattcgttttaacattggtgttaaagttccactatctaaagccaacctctttccaagttctgatacagtttgttcttcaacttcccatagaacaagcaaagcaatatattgtggataggttaattgaaacggctctaaagcttcacgataaagtttagtaaattgtttggatgcattgtaaacagaaaaacacagttgttcttctaatatgcgtgtattcgtgtccaacatgttctcctccttttaagttgcgtgcaatttaattgtaaccaattatagtaatgaaagctagttttttgctcaaaaaaagccttacctcatttttggaggtaaggcttttgattatattttagtcttctattcttttaaatactaaagtcgcattatgaccaccaaagccaaaagagttagaaattacaacatttacatttgcttcacgtgcttcatttggaacataatccaagtcacaaacttcatcttggtttttcaaatgaatcgttggtgcaataatattatcacgaatagtcaaaagcgcgaaaatagcttctatcccgccagacgcacctaaagtatgtcctgtcattgacttagtagaactaatcgctaattttttcgcatgctctccaaagacagttttaatagcttgtgtttcgtattcatcattgtatggtgtacttgttccgtgggcattaatgtaatctactttatcaggagtaagcccagcatcatcaatcgccattttcattgcgcgagcagcaccttcgccgtttggtgctggagcagtaatgtggtaagcatctcctgttgcaccgtaaccaacgatttcagcgtaaatttttgccccacgtgcttttgcatgttcgtattcttctaaaataacgatacctgctccttcgccaataataaaaccatcacggtctttatcaaatggacgacaagcagtttctggatctggatttaatgacaaagctttattagcagtaaatcctgcaagtgacattttagtgattggtgcttctgctccaccagtaatcattgcatcagcatccccacgctcaataactttaaacgcgtcgccgattgagtttgttgctgttgcacaagctgtaactgttgtagagttaatgcctttagctccaaaacgaatagaaacttggcctgaacccatatctggaatcatcataggtacgaaaaacggactaactcgacgatgtccacgatttaagaaaatttcatattgtgtttcgaaagtttccattccgccaattcctgaaccaatccaaacaccaacgcggtttgcattggaatcatcaataactaaaccagagtcttgtacagccatttcagcacttgcaattgcataatgcgtaaaacggtccattttacgagcttcttttttctctagatatttttctacatcaaaatcttttaactctgctgcaattttaaccggaaagtcatccggattaagtcttgtcatttttgcaacaccattaacacctttttttgcgttttcccaagaagtttccgcatcgtttccaataggtgtaacagctccaacaccagtaacaactactcttctcttatccatttactcatctccttatttttcaattcataaaaaacaacttctgtctaatgacagcagctagtataaagttaaggctttatttaaaattaataatagtgcacaaacaaataaaccaaaagcctgctccattataacataaataaaggaaagttgtcctaactaaaataagtgttagggcaactttccttgtttaatttgttgcttacttaccccaacgaatgattagggcgccccatgttagtccgccgccaaagcctacaagcagaacgttatcattatctttaatacgtccttcttccactgcatcaactagcgcaagtgcgattgaagaggatgaagtattaccatatttgtgtactgttttcatcagtttttcttccggtaaattcaaacgctcgcgagaagcttccatgatacgaatatttgcttggtgaggaattagtaagtccaagtcttctttctcaagaccagcacgttcaagtactcgtagtgaagcttctcccatttggcgaactgcaaaacggaacacttcacgaccattcatataaatctttttattttcatctaaattcaagtatttaccacctgatccatctgaacctaagtcaaatgaaagtaaaccatgatcatcagaaactggccccataactacagcacctgctccatcaccgaataatacggctgttgtgcgatcatcccagttagtgattttagataatttatccgcaccgacaactacgatatttttatatgcacctgttttaatgaattgtgctgcagtcactactccaaaagtgaaaccagcacaagctgcctcaacgtccataccggcagcatttttcgctcctaaacggtcttggataatattagcaactgaaggaaatgtcgcttcttgtgtaacagttgcaacgataaacaagtcgatatcatctggtgtaagaccagcattcttaatggctacctttgctgcttcatatgctaaatcatgcgtatattcgtcatcacgagcaattcttctttcttcgataccagttcgagttcgaatccactcatcagatgtatccataattttttctaaatcaaagttagttactattttttcaggtacgtatttacctactcctaaaattcctgcgttcatgtgttctcctccatatcaaactacatcagggcaaaaataaattttttcctggttatttttatgacctggtgctaattttaacagagaactatcaattaagcaattggattgctacttttttattttacttctaacgctttattaggattgttttcagcaaaaccgtctgcttttgaccagccaattacttttccatcgtctgacttaatacggtaccaatattcatttttcacatctgcacgacggtcaatgtctaattctttccctagataatcattaagattggtaactacttttgaattgtcttctactgggtaagcatagattttttgatccgaatcggtgatatatttatctagtttcacatttgtttcatttttcggggtataaaaaacttctacagcattactgtttacccatccaatagttttgccttgatcttgaagttgataccatgttcctttttctgtaacagctttttgagaaattcgaaggcttttatttttgtaatctttgacactacctgttttttctgcgccctctgtattatatggttttgtccaaattgtttcattgctagcatttttgatttctgcgtatgctaattggttttctgttgatgtcactgtatcgtaaatttggtcatattgatccaaattgtaattttcaatagttgaaatgagtttttctgcgtatgctgggtcagttgcataacctgcatcttgaattgcgtatgcagcttccttatagtttgtttctccgatgaccgctgagtaaagatttgcattaccagatactccgttaacaaaaagttgggcatgatcgactaaagatgcctttttgtctggatactttctgaaatcagcttgtgtgtggtaggctttcccgctgctaaattcttgcgttcccatcgaaacggaacttccttcatagcttcctttaattccaaacaggttattagctgaagttgataagccacttttaccccaattggattctaaaatggcttgcgctaaagtgacacttgtcaatattttttcttctttttgtagatcttgtgcatcatttgcgattgattgtataaattgttgttgtgataaagtcattcctgcttgacttactgtagtttggtttgttcctgctgcctctgcttgaacaaaaggtactaatgtagaacttacgatgacgcttgctagtaaaatctgcgtgaatttctttttcattatcagttggcacttcctatccaaattagttagttcccccaatttaaatggctctgtctctgttaaccttcttcattctagcattttcattctgagagcctactaattttttgatgaaagatttataataaagtaagcagaatggctagtataggggattctcgtgtacctgtttacatttgacaatattatgtcattgcttatctacccctttacactactattctccatttaaagttcatttccttcctttttttgataatcgtattttcaaatgatatatgattggataatccaattttatgtgctaaaatgtataatgaaatagatgaaatggggtgtaaggatgcgttacgtggtgactgtattttgggtattcttactttctttaatggcagaattcgttctttcttccatgttatatgtatcatttgatatgacgcgggctattattttaacagtagggttatccttcttcattattttaatcactttcttgatgcctaaagatagcgaagtttatgactttaagtaaacatccaactttctgatagcgagaactgacttttcagaagtagttcaaaaaaagaagctctttccaatatatggaaagagcttctttttttatttatccaagtaatatttatttactggttttaaatcagcgtttaattcatatactagcggtacgcctgttggaatttctaaatccattatttcatcatcactaataccttctaggaatttcactaatgctcgtaaactgttaccatgcgccgcgatgactactcgtcgtccttctttaatttctggagcaattgtgtccatccaataaggaataacgcgttctaatgttactttcaagttttcacctgatggaatagcgtgtgtatcaaggagttgataacgacgatcattttttgcttgtctttcgtcgttttcttctagtaatggtggaagtgtgtcatagcttctacgccatttttgtacttggtcagcaccatatttttcagcagtttcttgtttattaagtccttgaagtgcgccgtaatgacgttcgttcaagcgccaagatttatgaactggtacccacatttggtcagattcttctaacacataattaagtgttttaatagctcgtgttaaaacagaagtgaaggcaacatcgaattctaagcctgcctctttaattctttttcctgctgtcattgcttccacaacgccttcttgcgacaagtccacatcatgccaacctgtaaataggttcaatttgttccattcactttgaccatgacgaattaatactaatttcatcttcctcatccttccattttcgcctattttctaaacgactaatccaaccaaagttttccctttcaagtgaagtgtcaaaccttttttaggttattctgtgactttaaaagtaaattctttatctgctaaatcaatttccacggatgaatgtggcatgattttaccagagacaatttctcttgcaagtggtgtttcgacatgacgcacaatatagcgtttaagtggtcgtgctccgtataccggatcataagcttcctccgcaataaaggcttttgcatcatcggaaatagtgattgtaatttcttggtcggctaaacggatttgaagttcttctactaatttctccacaatacctttaatatcagcaagtgttagtggtttaaatagaataatatcatctacgcggtttaagaattctggtttaaattcactttgtaaaatttgcattacatctgattctaattccggtgaaatttcgccttcttcggttctttcaagtaataaattagagccaatatttgacgtcataataattactgtatttttaaaatcaattaatcgaccttgtgaatctgtgatacgtccatcgtcaagtacttgtaatagtatgttaaatacatctggatgagctttttcgatttcatcaagtaggacgatcgaataagggtttcgtcttacagcttcagtaagttgaccaccttcctcataaccaatgtaacctggaggagctccgacaagtcttgatacggaatgtttctccatgtattcagacatatcaattcgaatcatgtgatcttcggaatcaaacatattaaatgcaagtgctttagcaagttctgttttacccacacctgttggtcctaagaaaataaaggagcctattgggcgtttcggatctttaattcctgcacgagctcgtaagacagcatcactcactaattggacggcatcatcttgaccaattactttttgatgaaggacatctgctaatttaagcagtttttcgcgttctccttctactaatttagtcaccggaatccctgtccaacgtccgacgatttctgcaatttcattttctgttacttcttcttgtaaaatccgatcttcttgtgctgttttttcgcgattttctgcttctaactcaagcaattctttttccacagccgggattctaccgtggcgtaattctgctgctttgtttaaatcataattattttctgcttcttctaattcatggcgtaaatggtcgatttgctcccggacctcacgaattttactgatttcgtttttctcggattcccatttggacttcatttggttggcttcttctttgtagtcagccagctcgcgttgcaatatttctaaacggcgttcactcgctggatctttttcttcttttagtgctgcttcctcaatttctaattgcattacttttctagttacttcatcgagttcacttggcatcgagtcaatttcgacacgaatagttgcgcatgcttcatctactaagtcaattgctttgtccggcaagaagcggtcagtaatataacgattagaaagactcgcagctgcaactaaagcattgtcatgaatatttaccccgtgatgaatttcaaaacgttcttttaacccgcgtaaaatggaaaccgtatcttccactgttggttctgggacaagcactttttggaaacgtctttctagtgcagcatctttttcgatatattggcgatattcatccaatgtagttgcaccgatgcagtgcagttctccgcgggcaagcatcggttttaacatatttcctgcgtccattgcgccgtctgttttacctgcgccgacaatcgtatgaatttcatcaataaagagtaaaatttgaccatcactttgttttacttcttggagtactgctttcaatcgttcttcaaattcaccgcggtacttagctccagcaataagggaaccaatgtcgagtgagataatcgttttatctttcagtccttctggcacgtcttttcgaacgatacgttgcgctaatccttcgacaatggctgttttaccaacacctggttcacctattagaactggattgttttttgtttttctagataaaattcggataacgttacgaatttctgcatcgcgtccgattactggatcgagtttgccgcttctaacttccgcgactaaatcacgaccatattttgttaaagcttcatagttttcttctgcattttgagaagtcactcttttccctcctctgatttttaaaattgcttctttaatttgttttttagctttatgttgatttttaagctcggctgtaattggattcgatttttgatccataacagctaagataagatgttctgttgagacaaaatcatcttctaattgttgttgttctttttctgcatccctcattagttggaaaagagcttggctcattgcttggccataattcacgccacttcctgaaactactgggattttttccaaagtattctctattactttttgaagtgcatctgtatcaacttccgctacatcatagactcgctttgcaaagtcgctttctgttaataacactttaaaaacgtgtgcaacgtcaatttcttgatgttctgatgcaatagctagattttgtgcgtccgcaattgtttgctggacttgttgtgtaaatttttgtaaatccattcattcgtcctccttataaaagataagtctgaccttttttgaccttaactttattatagttttttatcttgcttttgtctaacaaaaaccttctttttttatagaaaaagatctaccaatttttaggttggcagatcttctgaatttcttaatcacgacctgtaaataggcggagtaagaacatgaataagttaaggaaatcaaggtataaattcagcgcaagcattggtacatctgctagttccacatcgcgcttcatgatttggttgaagtcgtacaaaatatatagtgagaaaataatcgttccgcctgctgaaataatagttgacagcatagagcctaatggtagaaagactcctacaaagctaaatataacgagaataataatcgcagcgaataaagcactgcttaagaaagataagtctttcttcatttttgcaccaataaaagctagcgttgtgaaagtaacggttgctgtaacaaatgccattagaacggcggcaccttgccctgcaccaaaataatatgtcaaagttggtccaagtgttaagcctgtgacaaacgcaaatgctagtactactgggtagcctaccactttattaattgttttacttcgacgcactaccatcgctgtgataagtaacgcgacctctaacacgacaagaggcaaataaagttctggacttaatttactcccaatcgcagcaccgatagatgcaagtagcaaagaaaatacaaaccaattaagtattttttgcataataatttgtttctctgttcttttctctgtgtttactcgctcggatgtgtgattgatttcgttcatgaacatttctcctcttccaattgattagttttattatatcaaaagaattattacaattctatcggtcttgcgttggaatttcacaaaaaaagaagcgcacgaggcacttctttaaattaaatcaaattgtttcaagcctagcataatgccgtcactattgttatctttcgttacaaaagtagctttttcttttaataaaggtacggcgttttccattgcaatcgcataatccactgcaccaaacatctctaaatcgttcatgccatctccaaaagcataggtgggaacatcttgatagcccattacttcaagtagtttcgaaataccaactgctttagatccgccttttcttaagacgtcattactaaatggcgtgttgcgaacaaattgtaattctggaaaacgttctgggaaatagtcatcgccagtttcgagtaatagaagtgccatattgatagtttcttctttatacatattaggtcttacttcaggcatcggctcgcctaaaaaatcataatgtgcttttacaactggcgtactagctgttgcgccaattcttttatcattataatagcaaacttcgacattttgtgattttgcttcttcagtcaactgttctaataaacctgcatcaatcacatcttcatatactttttcaccttcaaaaatagccatttgtccgttcatcattactgcggattcaatgccagtaattttcatttgatgactgatttctataagcgtccgaccagtagcaataacaggaataacattattttctcgaagtttatcaagtgcttgaagcgaggtatcaagtactttggattcactatttaacagtgttccatccatatcaaaaaaacaaattccacgtggtttcacattattcatcctttactaacataatatatccatcataccaatcttacggatgcaaagtaaaggttatttgtacataacaaaatctcctgtgtgctcaaaaccaagacggtgatatatctcaccagcgactggattatcgtaaaacaaacatggtttctttccttcagctaatacatcgcaacataatttttttagaagtgtacttgcaaagccgcgttgtctatattcatcacttgtcgcaacacctgtaatcattgctgaaaaggaattttctgcggatgtttctgctacggcaactacttcttggtcttgttcaatataataaattcgtttcacgcctttttcaatttggcgaataattaattcttcattttcgtcgcgtgaaccaaattctttaatgtgtttgcgcattttaataattgggcccacatcttccgctactgccgttctgacgataacatcttgatttactggaatacggtttacatgttcgcattcgcaaaaataagtgtcttgtcttttttcggcaagttctggtaaaaatgcctctagttcttttgtgacacgggacataccgctaacttcatatttgtcatgtgtagcaataatttctgagaacgcttctgcattaaaattagcgtcttttgaatagggtaagaaaaacgtatcgaatcgaagtaacaaagcatgtaatttgcctactgaatcgaattcaccccaaagatcttgcacatcactctcataaccaaaattttcgatgtccccaataataaataaattttgggttgcttcgggttttaaaagtgccattacttcttcattatcagatacagttagttttctaatcatgtgccacactcctattttgaaaattgtcttcattttacgtgagttaggtaggttcgtcaagccctgaatcttactattttgcgccatataaaaaagctcgggacaattagtcccaagcttttatgattcgtaatgaatctcgccaattttcaacattaagctgatagcattgaatttttcatctccaagatgcattttgtttgtatcttgaaaagtgataggtgctgctgtaatcgcttctttcggttgttcaaagaatttttcttcaagtgccaaactttctgtaatttgcgatatgtatttttggaatttattttcgtttctcatcttccctatcattaatgcttttagcgtattctgggaaattccgactgcaagcgcgaatgttctatgagtatatccatttattttcatataaagtgacaaattagtggcaattctttgtttttctgccttgtttttcatttgggtgaacctcctgtctttctatatttatcattatgcccggtgaagatgagaatttgattaaaacttcatagtatttagctaaaaatattgaaaacgttttctttatttcaaaaaaatatgccggaataacgaatatcccggcaagacttttatttaattgctatatttttcccagacaactgttcttaatacttctaagaattctggatccgagtttggcattggtggtcggtgataagccgcgcccacttcatcggtaactactttacattcataatcattatcatataaaacctctaaatgttctgccacaaatccaactggcgtatagataaagtgtttatatttttctcgaccgtaaagttctcttgttaaatcttgtacatcaggtccaagccacggctccccagttttcccttcgctttgccaacctagcgcataatgaggcactactactttttcgaaaatgaaatctgctgtttcttgaagttgatttgggtacggatcgttatgttgtttaattttctctggcaaactgtgtgcggaaacaattaaaacagtatccaataattcatctgctggaatttgttttgctgtttcattaattctatcagcccacatttggataaatttgggttgtttgtaccaatcattgattgcgttgatacgaggtccgcctagtttatcagctgcttcttttgctcttttgttgtaagcctcgacactaaagctagagtaatgtggcgctaaaacaatcgagatcgcttcttctattccgtctttatgcatagcttctaccgcatcttcaatgaaaggttcaatatgttttaaaccgatatatgccttgaattctacttcatcctgcgagtcatttaacgctttttctagtccataggcttgtgcttcggtaatttttgcaagtggggatagtccgccgattgcatggtatctaccgcgtaaatcggcaatcatttcttcacttggcttatgaccatgacgaatatctgtatagtaacgttcgatatcttcatctttatacggtgttccgtatgccattacaagtagacctacttttttagtcattttatatcatccttttttaatagaatttcgctacgttcatggatgtaattagttagttgtttcaacatttctggtggtacttctgggaaaactccatgtcctaaattaaaaatataacctggttctagtacgccttcttgcaaaatacgatttgcttcttttaaacatttctctggtgcaagaagtgtggacggatccagatttccttgaattgcttttgttggaacttttttccgagcacttgtgatggtttctcgccaatcgacgccaacgacatcaagtggcattgtttcccattcttctaaaagatgacttgcgccaactgcttgcataataattggggttgttggatgaactgctttcacttctctaacaatcatttcgattactggtcgaatgtattcagcatagtcagctcgactaagtgctcctacccaagaatcaaacaattgcaccgcagaagcccctgcattaatttgcgcaatcaaatagttcgcagtcattcgtcccaatttttccattaatattgcccaaacttctggttcgcgatacatgaagctttttgtttggtggtaatttttcgatggaccaccttctatcatatagcttgctaacgtaaacggtgcacctgcaaagccaattaaaggcacatctaacatatcatctgctaataattttatcgtatcaagcacataaggaacttctatttctggtttgaaaattgtcagtttctctacatcttgaaaagatctaataggattatgtatgactggaccaataccagatttgatttcaacgtctactcccatccccggaagtggtgtcataatatctttgtataaaatggctgcatcaacaccatattgatctactggtaatttggttacataagcacatatttctggctgatgagtaatctcaaatagagagtatttttcttttaatttgcgatattctggttgagatctccctgcttgtctcatgtaccaaaccggaattcggtcaacttgttcttttcgcgctgcttttaaaaataaatcattcgttatttttgtcatcgagtcgcttcccttctttgttcatttacacacaataggcaacagaacaataaataacttctccagataaaaggatactagaaaatttgtataaaaccaaacaaattgcctatcagctgtttcaattatgaaaaacgtggaaaataaaggtgtaatcatttttcttaatggaataaaactgaaagaaggacttattatgaaaaaagtatttatcacaacaggaacggagcactaccttcgtcaattaatggcgaattatactggcggaaatgtgacacttctgcaaaacttttcccaatcacttttgtatcaagagtcgactggtgaaaaacttttccaagaaggtgctgagtatcgagtattgcaaagcagtggttccataaaaggttttggagtagtcgtctttgaatatatccacctccgcgatgaagaaatccctattttcttgcaaatgtatcaacgagctagtcttcattttagtgaaacgcctggcttgcaaagtacaaaactcacaaaagcgatgaatatgaataaatttttaattatttccttttgggattctgaagtattctttcatgactggaaaaaatcacctttatcaaaagaaattacaaatatcatgagaaaaaataatactcaatctggattctcacatgaagatatttatcattatccagaattttcccatgatgctaaataggaaaaagcgatttggaccaatcatccaaatcgcttttttcattcgtacatttttttcattctgactggagcataaaggaacgtgaagatgactacaaaagccaaattaattcctaaaataatcatcccgccgatggttccattttgtgcaataccaatcacgctaaagagcagtgcttgagcgagtaacaaaatccgtagaaaatggataaaactgcgatgacgataacgatcattaatcgggtaaagtcgtagcataatttgcgcatcataatgttttaacatcggaataaattgaaaaccagttaaatacaaaaatagtagcgaaaaaataatacttaaataaaaaccttgaacaaacacaagtaaaataactgcaatcacagtaagtctaatgtatagaccggcatattcatttgttctaataaatgtccgactgaacaaataagcaaatgtttttcttttcgcataaggaattggttgataaagaaaatcgagataactccgtctccgaaccgttcctcgtaagtgaggtacatccgtaaatagattcactaaacgatagaaccgattcatccgcgcttcttctttatccactaaatattcccagcgtaaagttacttttgcagttttagttcgaagccagtagtaactcgccgcaagtactactaaaaccaaaggaatagaaatgtaaggggctgctattaatgcaatataaattaaaatagcgttaaggataacacgaataaacatccatgttgtgtccgcttcttcaaatttcatgctttcccagccaaaataaatattccatgctttaagcatactaagtacaataaacaaagtgaaaaactgactatatggaacctttgtcacttccacatacatcggcatacaaaccccaagcacaatcacaaaaacatataattgcatgaagaaacttgctatttttgcttgagaaaaatacgtatccattgctttttcctgtacaattaaataaacaatatccggttttttcaacaacgtggcaacaggactaacggcaatagaagcagtgagtaaaataaccattaacggaataacggggaatgttggctcaagtgtcttcacccaaccagcgtaataaaaaattcccgctccaagtccaatcacaagcacaaaaagcaaatgatcattaaacatataacgaagatagcgcatgacttcggtcgtataggcactaaaacgttctttccaaagcgctttgctgtcaaatatcatcttcatcagcttcctcttcctttgtcaactgaatgtaaatttcatcaagtgaagctcctggcatttcgaaatttgtttgcaagtcttttaatgttccttctgcgcgaatttcaccttgatgaataataatgaacgtatcgcaatatttctcagccgttgcaagtatgtgcgttgacatcaaaatacttgcacccttacttcgcatttcatccatccaattaagcagtgactggattccaagcggatctaaaccaacaaagggctcatcgataatatataatttaggctcaattaaaaaagccgacataatcattactttttgtttcatccctttagaaaaatgagctggaaaccaattaagttttttctctaaacgaaactcttttaaaagaggagtcattcttgcatgtagctcttcttctgatatgccataagccatacctgttaattctaaatgttcttttaaggttaattcttcatacaataccggtgtttccgggatataagaaaattgctttctatatgtttctgtatcttcaaccaattggtgattattgattttaatggttccttgtttaggatgcattaggccggttatatgtttaatcgtcgtacttttccctgccccgtttagcccaattaagccaacaatttgtttttcttcaatcgcaaatgaaatatcttttaagactggacgtttggtatacccgcccgtcaggtgttcaacttctactaaagccatttccatacctccttacgtaatctttagttaataatagcatattcgtcccttgaactgtcaaaataatccaccacctactatctaacacatgcttttcactgctttttatgttaaattaaaatagtacataattatatgtaatgaaaggtggtcatacttaatggacgattgcattttctgcaaaatagttcgtggtgaaattccttctgccaaagtgtatgaagatgatgaagtatatgctttcctcgatttaggccaagttacagaaggtcatacactcgtaattcccaaaaaacatgctaggaacacattcgatttacccgatgaaacggccgctgaattattccgccgcgtaccaaaaatcgcgcgggcattaaaagaagctttaccgattcaaggattaaatattttaaataataatgaagaagttgctttccaatctgtttttcattgtcacatccatttaataccaaggtatagcaaatcagacgactttgggttaaaatggaaagataacgcagactggtacacacaagaacgttaccaagaaattgctgaacttattgcagcaaaagtagactaaaatgactttatggatggagtggagtataaatgaataaaaaatcacttattttcggtattttagctggtggggcaattggagccgcagcctcggtattatttgctccaaaatccggcaatgagcttcgaaaagatattgtcgctaaatcaggtgaagcaagtgttattttgaaagaactcgcatataatgcaaatgagcttatccaatccgttcaagttctcggcacagaaggttccactttattaaaagatgtttcttctgacatcatggaatctgtttccaaatggaatgaagaaatggaaccggagaagaaacgcttaaaagacgaaatcaaagatatgcaaaaaacaatttctgacttagaaaaaacgctaaaaaaagataataaataagtagagaaactgggcgactgctcagtttttttatttgtctaaaatccctttcaaaaaaccgtcataattagacaataatttctctaaaaaaagcttgaattttgtagcatttgagcatacaatactatggtgccttctgatggaagagcactattttagctataactggaggaaagcttacaatgcgctgcctaaaatcaatcaacacagagcgacgagacgaatttaatcgacttttcctaaaaggaattcttgtctggctagctgccgtatgtatttgttttttaacacaacatttgatctatcctgatcaacttacaaatgattatcaacttgctagctttttaggtattattttaatttacccaattcataaattacttcatattcttggatgctttaaataccgtgaaggaactgttattcagtggcgtattcatttctttttccttccttgtatcaaattaaatattaagcgaataataccaaaatggcattacattttttcgttaattttaccatttgtgattataacaactattttagtcgcattaatgcttttcacaccaatcggacattccggtatgttcctattattactatctgtccatttcggaatgagcttttctgattttacacatattaaaaaattatggaaaatgccgaagaattgctttatcgaaagtgcagaacgtggattttctgttttaatttctgactaaaccataagaatatcattaaatttctttcatcttttctttttacctttaatttatgttatgatagttattgtgttaagcgggaattattccaacaactaaggagtgtgttttatttaatgaagaagaaattaattcttggacttgtcatgatgatggcattgttcagtctagcagcgtgcggtggcggcggagatgtcgttaagacagactctggcgatgtaacaaaagacgaactttatgacgcaatgaaagataaatatggctctgaattcgtacaacaactgactttcgaaaaaattcttggcgataaatacaaagtaagcgacgaagatgttgacaagaaattcaacgagtataaatcacaatacggagatcaattctctgcagttttaactcaaagtggcttaactgagaaatctttcaaaagccaacttaagtacaacttgttagttcaaaaagctaccgaagccaatactgacactagcgacaaaacacttaaaaaatactatgaaacttggcaaccagatattactgtaagccatattcttgtagctgatgaaaacaaagccaaagaagttgaacaaaaactgaaagatggcgaaaaatttgctgatttagcgaaagaatattctacagatactgctactaaagacaatggtggacaattagctccattcggtcctggtaaaatggatccagcatttgaaaaagcagcttatgcccttaaaaacaaaggcgacatcagtgctccagtaaaaacacaatacggataccacatcatccaaatggacaaacctgcaacaaaaacaacttttgaaaaagataaaaaagctgtaaaagcttcttaccttgagtctcaattaactactgagaacatgcaaaaaacacttaaaaaagaatacaaagatgctaacgtgaaagtggaagacaaagacttgaaagatgcttttaaagattttgatggttcttcatccagtgatagcgattcatctaaataagcactaaaaaaacacgcttggaaatttccaagcgtgttttttattcaaatgtaggattataaaacgaacgattatctaatccaaatactcgttcactgaattcgcccggttttgtatgttttagtactttatccatcatgttcaaggaagcgtccattaaatcaatttggtgtaaaatctcggcttcacgcacaagcggtggttttggactcccccactcacctttaccatgatgagatagaagaacgtgttttaaaaccacgacttcttcaccatcaatcgaaagttcgtcagcaattttgctcacctcttctactacgatggaaatatggccaattaaattaccttctagtgtatacgtcgttgatactgggcctgaaagttcaatgacttttcctaaatcatgtaaaatcacacctgcgtataataagtctcgattaacagatgggtaaagatcggcaactgattttgcaagtcgtaacatcgaaactacatgaaaactcaaaccggaaacaaattcatgatgatgacgcattgccgccggataatcataaaaatcatcttgatattttttaagcaatgcgcgcgtaattcgttgcaaattcgcatttttcatttcgaaaatatattgtgtgatttcatcggccatttcttctttattaattggcgcggtttccataaattcactagcactaacaccgtccagtgctgtagcttgcctaatttggcggattttcaattgttttcgaccacgataattttgaatatcacccataaggtgaactatttgttgtaccccgtaattcgcttcatcactttctttaacatcccatagttttgcttctaattcacccgatttatcttgtaaaacaagactcaagaatggctttccgttgctagccgttccttttacacttgatttaattagcaagaataggtctactgtttctccaacttcaaaatctaataatcttttttccattttatcgccttctttctttctgtagtaagaagtttctccacccattatagcatgcgtatgtcctcactggaaaaatatttgcgagtttcttgatggcatgtgaaaaaaatgacttggttttcactttttctttttcggagcagttgcatcatttgtcccatcctagcagaatcaaaatgcacaaatccatcatcaataatgattggtagtggaaaatctttatgaatcacatcaattaaggcaaaacgaatagccaaatataattgttcttttgttgcttggcttagctcttctgggaagaatggtacaacattcttactttctacttgaagcctattatcttgtaagtatactttgtcatagttaccattagttaagtggttgaaatattcacttgctaattttaacgttttaggaagttttccttcttgtaaccgttgcattgtatcttgtaaaatttgaagcgccagttttgtttctgtccattcggctgctatttgttgtagtttgctcttttccgaatagaattcttgcatcaataccgcgaaagtcccgccttcttctaatttgtgtattgcgtggttttgtgccgcgagtgaggcatggattttttcttgttctagttctatttggcgaagtgtttcttccaattgcagctctttttctttgatagttgcttggttttcatattgatttagagctattcgcttttctggttcaagttgggcttctattagaactaatcgttctcgccaattctgttcttcttttacacgaattgcagccatacgaaattcttcttcattcttcgcattagcactcgctaataaatctgctttttctttctttatgagcaataaatcttgcttaactaagtctagttgcatcgttacttgttccaacttttctgcaagctttgcattttcagttaagtggttccgataatagagcaagccttgtcgtaaaaaagtgattttttcttctgtatccgtatattttccaggcaattctaagtttgcaagtcttgctttatatacttcttgtttctctgctaatggttctagttttgagataagttccattgcaagttgagctttttcactattttttttataaaccgcaagctcatatgcccaatttgcatcgggattatgttttattcctaaatcagaaaaaagttgttttaattccattgtatgttgataaattgtttcgtttagtttattctcggttgctcttagttcagctatttgtgatgcaataatgtccatttcgttgagaagctgttgccattcttgccttattttcttttgttctaaaaaaactaaaagttgttcattgtttgttggaagtgctttccatgtagtcataattgcataacccacaataagcgcagatacaaaaacaagtgctacactccagatagattggaaaacaatcatcagtgataaagctacagcaaaaacgccaaatgaaacaaaagtcttagttctaaatgttttaggcttctgttgcattttttcttttgcttgttggaatgttctattatcccacatatccatttctatttgatcaatcttcttttggagtttttcttctgtatcattagtaagttttaattttaactgaatttcatgttgttgctctttgtggaactgttctttttcttttaaacgggccattgtttgttcaagttcgctcgtccatactctaaatgtttgttttgagtcaacttgatgaaaattaatttcttgttttaaattctttaactggatttctcgctctccaaaagctgcataggtttcgattaaatatgttatttctgcttcatttttggcaaaaaaagcgctatgttcataatcattgttgctaattagattttttttacgttcttccaattgaataagctgattttgccattctttttctcggagctgtaggtgttctaatcgtataattccatctggcggaaaagtagcttcctttttttgggaagccttattacttagtgctttccattcttggtataatggccacaaatcccctaatgtttctaatgtatctaactctactcgtttagttgttttttctatttgcaactctgcttgtcttgctgtcgcttgctctttctcattaattaattcttcatattgcgcattttgctttttggcattttgaaaagcttgttgggcttcttttactcttttaagctgttgattgattaatggatttcgcccacttggtttataaagactatctagttttttttgtaatgtttctgctgtttttaaaagtgcatccgagccagttgttcctgtcgctaacaaatagcgttcaaactctttcttcttccattgatgaatattttgtaatccgtgtatatcaaaagaaaagatagcctcataggtgtttcgatcaatttcgccaataatttctggcaatttttcttctccagcagtttgaccatcaccgtaatatattcgaacatctccagttgcttttccttttaaacgttcaatgatgacttttccaaaagaggtgtcttctagcgttaatcttccgccgtatggtccaccgttttttggctccatgcgtggtattgattgttgtttcgttggaaaaccaaacaaaatactatgtataaaagccataatagttgattttccggcttcattttcaccataaaaaacttgaaaattggcgatgttattaaaatgagcatcggaccatttcccataaccaatgatatcaatggatgttattctcatttttcatcaccctccacttctgcaagtgtcattcctagttccattaaagcattttccaagagtctctcacgctcttgttccgacaaatcatccaagtatctgtttgcaccactttcaagatacagcgcttctactgattgataaaaagctgattcatcttgtagttgctcaaatgagcgcctaatttcttctcctgctaaatgcgattcataccatgtttgtagattacttcgattcgttatctcagttgtcaatttgtggacccacacaaaagtagtgtttgaaagctctacttcttcttgaagcatttgcaaccagtcatttgtatttattttttgcgaactagccatttgaataattatatgaagaaaatacgaatggctacgtccttgataactttctagaacattagtaatttctcggtaaaaggcatttatttcactatttttcggcaacgggatgataatttcttcccaaataatcggacttgtaccaataaaatcaattgttgtacttgcttctgataagttgatgatacttgcgcctttttcacctgattctttgcggtttcgcccttgaatatttcctgggtaataaatgctaggagactctgcaagcaattgtcgcttatgaatatgacctagtgcccagtagtcaaaaccttttttgctaatttcttgcacgcgaaatggggcgtagacatcatgttcctcgctactagatacttctgagccatgtaataacgcaatatgaaaatcagcatcaccttgaaccttgtattcatctattcggcttgagcgaatatggcgttcattgtaactaaatccataaatattaacgctcacaccggtggctgttttatgcaacattacttctacttgctctgaaaaaacgtgaacattgcttggtaatgcgagtttttctttatgcttttctataaaatcatgatttccatgaatcataaacacggggatgttcgccacttctaaccgtttcatttcttttgcaaaacgcgcttgagcacggacactttgatcttcactatcatatatatctccagcaattaaaacgaaatctactgcttcttttatcgccacagttgtaatccgttctaatgattgaaatgtgctttcttgtatggcagaaaaaagcggctgtggtagcgtcgaaagcccgatgaaaggactatctaaatgtaaatcagccatatgtaaaaatttgatttctttcatgactttcgcctcctataaaaaccgaatatacgttcttattatatcgtactattgcgttaggtacaagcatttccaataaaaaaatgaccctattatctgctaaataaataacaaataatagagccacttggtttaacgaaaattaatcattagctacattataaagatcttgtaatggcgtcatgataatgcgatttagatcattgataattgtgctcatcgcttgctctttttccattagtttaacgattagttcgttttcttgaacttcttgcgctacttgttgtgctacatctactgtttcatcgtcaatttcttgaccagtcatttgtttttcttggatagttacttgaacatcgcgaaaacgttcgaattttgcttttgcatctgcattttcgtttacttcacggtatgcatcttgcaagctgatgaattcaggtgtttcacgaattcctttgtctaaatcatgtgctaaatcataaatattaactgccattgataaatcctccaaatatctgtatttgtcacttctgtttcactataacaaaaagtcgccggttattccagtataaaagaactaaatccacattgcgagaattccttgaataattccaataaaacctcctaaaatcccacctaaataagtaatcattttcaattctcttccagaaatctctacaacaagtttttcgatttcaggtaaagaaaaagtggcaatttgtgtttcgactagtttcgctaagtccattctctctactatttccgcgctatgcgttgctacaaaatcaagcatccgttctactgcaaatggaattactttttctgtaatagctgcctcatagccacgtagtatcacttgaatgggctgattaaataatttctcatgaggtaaagtttggataagttcagaagtaagttgtccagctaaatgagcttgcttttcagtcgggataagctcttgtaattcttttgcttcgaagtttttccattctgttgttagaagctggttaattagatttttggtgtcttcttgaccaatgagttttaagccttcttgttgaattttttcagaaaagctatcgatattaataaacattctagccatgcttcccattttgccgtgttcttcaaagaatttttgtagcatttgtttaatttggattttgccttcttcactcgctacaaataatgtcattttgctcgtgattctttctgttacatgtggtagtttagttgttagttctgactctaacattgttggaattaaatcgctcatttttgtcgtttttttagtacttagaaagtggttgatttctttctctaaggttttttctatccatgccatagaacggatttctgcattttcataaccaaaatgatgtaggagttcattaggtgttgtttctaatttcattttttcatggaacattttcgtaatggtatcagttatttctttttgtaaattctcatctagcaaacgagcacgaatggcgtcttctgtaagcaaatgactcactactacttttccgatgtgctcggctagttcatcacgtcgttttgggattaaacctggggtaaatggtaaacgtttattaaataggtaaatggctttgtaggggcgaaaaagcattcggatggctatataattcgtcattgcgccaataaatccgccaatcactgccattaaaagtatcgtaaataacactgacatgttttgcatctcctaatatttgtctagtaaaagtggtttcattatacgtgaaaaatccctagacaacaattgtttctagggaagttcattctaaagtatgagattacaaattagtcattttcaatggatttatccacaaatcaaattctttttctgtcacaaagccggttttgattgccgcttcttttaatgtcgtattttcatcaaaagccagtttggcaattttagcagctttttcatagccgatatgcggattcaatgctgtaacaagcattagggagtcatttacttttgtttcaataactttttcattcgcagtaagtccttccaaacaatgcactcggaacgaacgcatgctatctgcaagaagtttgatagattctaggaaattaaaaatgataaccggcttgtagacatttaactcaaagttcccttggcttgcggcaacattaattgtcacatcatttcccatgacttgagccgctaccatcgtaattgcttcacattgggtagggtttactttcccgggcataatagagcttcctggttcattagctggtatctctagctcacctatgccgctacgtggtccacttgctaataaacggatatcattagcaattttcattagatccgaagcaaggctacgaatggcgccatgaacaaaattaatcggactatgactagttaaagcaaaatacttattggaatcagaagtaaaaggatatcccgtttgtttcatcaattcttcggcaaccttatcaccaaaatcacgtgaggcatttaagcccgttccaactgcagtcccgccaattgcaagtggcaaaattgctttcatacttgtttcaagatagtttttattatttgtaagacatgcttcccagccactaatttcttgaccaagtgttaaaggagttgcatcttgtaaatgcgttctaccaattttaacgagatgcatatatttatttttcttctctgtcaaaacagcttccattttagttatttctggtaaaagttttgttactaaagccccgtatgcggcaatgtgcatcgctgttggaaatgtgtcgttcgagctttgtgacatgttaacatcatcatttggatgaatttgtccttcgcctaaagttaagttggcaacgtgtgcgataacttcattgacattcatgttgctctgcgttccgcttcctgtttgccaaacgactaaaggaaaatgctcatctagttctccttgaatgatttgatcacaaacctggccaatcgctatcgctttttcttcggctagttttccttctgctgcgttcacttttgcagtggctttctttaactgagcaaaagcatatataatttctatcggcataggattatcaccaatagcaaaattccttttacttcgttctgtttgcgctccccaatatttcgtcgcatctacagaaatttctccaagcgtatctcgctctattcgttccatttcgccacccctttttattctattttagtataaagcggatgttttcgcaaaacacatggaaaatgttcgctattccgtttttggaagtgcttttattttaatcattagaacagtcaagcctacaagtaagataatccaggctgcagtaatcaaaattgtgggaataaaataatccatcgtcttaccggacataataagcatagtcgcatttttacttaaatacgccggattaaatatttgaatccagccaccaagtccactgattagtcctaaaacaatcgctataaagacactaatcattgcaacaacggcattactatcaaaaattgagctcgcaaaaaccaccaaactaataacaaaaataaaccaaacggcatacacaaaaaatccctcaactaatgaattaatcgctaattctccaaatagaaagtacgtatagtaagcagccaagacatagccgattaaaagcgaacttaaccccaccacacattgcattacccatttcgataacacgtattccacagcgctcactggccttgtcataataaatgccaacatacctcttgttcggtcattttgaatacaagccatcgcaacaacgatgataatgataataccaatttgatcaaactgggagcctagtgtttgtgccatcacttcctgagctgattgattccccattagtgcaactacctgctccgtttccgcccctgtgccaactgcttttagaatttctggtaaaaaatacatcattagtggttgtgtgagcccaagaagtgcgaatacaatcggaagccagataatttttaaacttcgacgttgttccagccattcttttgctaataaagcattaaaatgtgtcatttgcccaccttctccataaaaatttcctctaaactttggtgtctattttcaacacgaataaattcaccatctatttgtaataaagagctcaaaacagcttctgatccagctttttgattagttgtgtaaacttgatagaccattccaactttttcaattttttccacgtatttattttgaagcagtaacgtttgccaagcttcactatttccattaaattcgacatcaaacaccggagagctttcttcttccataagttgcactacggttttatctgcaactaattcgccatttttgataatggcaatgcggtcacaaatttcttcagcatcttttaaaatatgtgtagaaaataagatagtaatctctttttttagtttgtctaatagcagcatcatttcgcggcgaccaataggatcaagtgcagatactggttcatctagtacaaggagttctggtcgatgcaaaatggcttgagcaatcccgagtcgttgtcgcattccacctgaatacgtactaatttttttatttgcactctcttctaaccctaccaataataagacctcgttaatacgagcttttagatccgtcttttccatattagatagctttcccataaaatgaaggcattccgtcgcactcatccaaccataaaattctggatactgcggtaaaaaaccaattttctctcgaactaattttgcactttcaccatctaaagtaatttgtccttcatcctgtgttaagatttggacaatcatattaatcatcgttgattttccagccccattaggaccaataagtgccacacattctttttcattgatagtgaggtcaatccctttaatgacccatttgccattatattttttctttagcccttgaatttctaattttttcattagttaacttcctctttgcggccaaaaataaagtaggcaatcggtccaaaaatattaataacgatgataacaattagccaaataataggattttttcgtgtattccagttttttgttaaatcaataatggcagttaataataaagctaaataaagaagaattacgggtataattaatgcaatttgtgttttatccaatttactcacctcatccttttgttatacttattgtataacagttataatattaatgcaatataaaaaagcacattttactagagatatcatagtaaaatgtgcttttaattaattacctatcgaatcgattaagtttccaataccatcagaaacttttccaccgaattcttttactttatcggcgccttttttgattgtttctccagcttcatcggctttttctttcacgccactccaaaagtcgctaccactgttcttttctttttcttcctcttcttttttcgctgcagtttcttgtgcggcactcttcgtactaaagtctgcggatttctgatactgcaaaccactattcattacgtagtgagccaaactagaaacaccagcagaactggttgtagttagataatgctctttgtcagttttatcatatcccatccaaacggctccgactaggtttggtgtgtagcctacaaaccattgatcttttgtaccgcttgtatcatcaaatggaacttgcgtggaaccagtttttccagccatttcgtgaccggaaacagctgcactttgaccagtccctgtattgataacatctaaaagcatggaagtcatttcattagatactgtttctgaaatgatttgtttagtttttggaacattttcatatactgtattccctgatggatcgacaattttagtaataatatgagattctggtttggcaccgttgttagcaaaggttgcatacgctgttgccatttctactggcgaagcacctttactcataccaccgagtgcaagcccgagcgttctatctttttctggaactgtaataccaaatttttcgacagattttacgcctttatcgataccaatttgatcaagtaaccaaacggcaggggcattaatcgagttggctacagctttatacattggaacttctccactataaacgccgccaacattggttggtgtatagttacctttgtaggttattttttcatcttttagcattgaatccacgtcataacctgattgaagcgctggtgtgtataccgcgagtggcttcatcgtggagcctggttgtgctttcatctgtgtcgctctgttaaagccacggaaaacatgctctccgcgtccaccaacaagcgctctaattccaccagtagctgggtccattaaaacagctcctgattgaactaatgtgccatcatttgcattagaagggaatagcccatcattgttgtaaacattttctaaggaagtttgataattttgatctaattccgtatagattttatatcctttttgcatgatttcatcttgcgttatatctgcttcatttacagcctcattaataactgcatcaacgtaccatgggtatttattcgcaagcggatcttttgattgatcatttaaaactatttttgtagctttgtatttatcgccttctgcttttgaaattgtgcctgtttcgaccattgcatttaataccatgttgcggcgattagtcgctttgtcgatatgttggtaagggtcatacgcacttggagcttgaagcaatccagcaattgtcgcagcttctggtatgtttaagtctgctgctgatttaccaaaatattttaaggaggcattttctactccccactccccattaccaaagtaagaacggtttaagtacatttccataatttcgtcttttgagtaggttttttcgatttcacgagccataaatatttctttggcttttcgtgtgaaggtttgttcttgtgtcagcagagcatttttggcgagttgctgcgtaatcgtactaccgccaccagaaattcctccgctagtgactaaattaacaccagcccgagctattcctttcaagtcaaaacctttatgttcataaaattttctatcttcaatggaaactactgcattttgtaagtttttagatattttatcgatggatacaaatgttgcgtcagtagaagaaagttccccggccttgtcgccatctttgtcataaataatcgtggctgactctaaaccttttttaagcgcgtctatgtcggcagactttgctactattacaagataaataataaaacttaataaaaatacaagtccagctagtaaaaaaatctttccgatatgtttgtttttccagaagcgtctaaatttttgccatcctttgttaagccatttccctataaaaccaaagaataattttaagtatttaataagttgctgtttgaatttgtccatgtaactctcctatcttctacacggtattaaataaactatacacacagttatacacgtattttacgttaaaaagcaactttacgccaccaactttagaccgatttttgtaataattttgtaataatccatatttcctacatatttattaacctcttttttacaatttcttcattttaatgtttctagtaatttaaaaagggtagatattactgttaccattacttgtgttttggtaataattatcatctatatactgtgtacaacaagtaatggcagcaagttttacatgggtccattaatacgccggaaaggaattggaatatgacgcaaaagctgatctactttttatcacaaacgcatattcgaagtgccattgctgaagcttgggcgaaaagactttcacttagcaatgtcaaattcattagcggttcttggcataaatctaaatcaacaccgtttattgcagaagcgttaaatgagtttgcaatcgagccacctgaaagtttgtcttattcacctagttcagaattactggcagatgctgatctcattgtaacaatttatgattctgcacatgaaactgcaccaaaatttccagctaacatacaagaaaaaattatttattgggacattgatgatccagaacaagaaatagcgttaccccaaaaatgggcgagttatcaagaagtatgtgataacattgccttatcagtaaaaaatttagagcacgtattgatagaggcttagatttcgttgtcccgccatttgtaggcgggacttttatgttaaaagagaaaggagtacatacataatggatggatacaacgatttaaaaaaggctgaaaaagcggcatttttgagtatatttgcctatttatttctagcggttttaaaaatagttgctgggcaattaggaaactctgatgccttacttgcagatggtttgaataatacgactgatattgttgcttctgttgcgcttttaattggccttagaatttctcgtattccgcctgatgcagatcattcatacggacaccgacgaacagaaactatcagctctttaatcgcatctatcattatgtttctcgttggtgtgcaagttatttggagttcgattgttcacattatcgaaaaagaatttgcaacaccctcaatgttaaccgctgttgtcgctcttttttctggtgtatttatgtatgctatttatttatataatcatcagcttgcgaaaaaacttgatagccaagcagtgcgagctgctgcatatgataatcgttcggatgcctttgttagttttggtgcatttatcgggattatcggcgcggttcttggtgttccttggcttgactccgtgacagcctttttggtcggtattttgattgtttatactgctatcaaaattttctatgatgctgcacatacattgacagatggtttcgatgtttctaagctagaaactattcatgatttaattgcttctgtacctgatgtcaaaaaagtaattgacattaaagcacgaatgaacggaaataggatttggattgatgcaactatcgctgtggatcctgaattaaatgtagttaaaagtcatgaaattaccgaaattgttgaacaaaaaattcgcaacgaatacgaaggtgcattcactttagttcatattgaaccattttttgaataatattcattgtcaataatcgtaaagtcaactataatttagattaaagtatcatttgctgggagggaatattcgatggggcagagaaactaattcacataaattatcaaactagaatgaaaaatatgcagcaacacattggaggagttctcttccagggcgttttttcttctatatagatagttttatcataagcttatttatattaaactaggaggtgtttgccttagcagaaactatttctgtcaaggcgatttattgatattaaccattaaatttttaattatagctttacttattgctatatcagcatttttcgtggcaacagaatttgcgattgttaaaatgcgaccgagccgtttagaccaattaattgcggagaaagataaacgcgcggtcctcgctagacatatttacaatcatttgaatgcttacttatcagcctgccaacttgggataacgattagctcccttggacttggttggttgggagaatctacggtagaagcggcgttacatccgttatttagcttaatggaacttccgcaatcagctattacgattctatcctttacaattgcatttctatttatcacattcttgcacgtagttgttggggaacttgtaccgaaaactttggcgattgataaaacagagacagttgcacttgcggtagctcgtccactgcatattttttataaagtgatgttcccgttcatttggattttaaatggttctgcagttttcatcgcgcgtctttttggtctagagccagcttctgagcacgaaatcgctcataccgaggacgaattaaaaataatcgttggtgaaagttataagagtggtgaaatcaaccaatcagaattccgttatgtgaataagatttttgattttgatgaacgtatggcgaaagaagtcatgattccgcgaacagagattgtgaccgttgatactggatctacaatcggggaattatccgacattatgcaaaatgaacgttatacacgatatccagttattgatggagataaagaccacgttatcggcgtacttaatttaaaagaaattttatcagcgtatgtcgaacatggctcgagtccaagttttagcattgatccttacgtaaaaccaattattcgtgtgattgaaacgattccgattaaagaattgcttttccgtatgcagcgtgaacgttcccacattgctattctgcttgacgaatatggtggtacttctggacttgttacggttgaagatattgtagaggaaatcgtaggtgatatccgcgatgaatttgatgccgatgaaattccagaaattcgcaaaatcaaagatggacactatattgtagatgcgaaacttctgattgatgaagtaaataacattttaggtactgaaattgaggaagaagaagtcgacacaatcggcggttggttcttaacacaaaattatgaagtagaagttggggacgaaattgattatgatggattcattttccgcgtaaaacaaggcgaacctcatcatattgaatatatcgaaatcatcaaaaaaacaaatgattaatcaaacagtagctatccctctcatagggtagctacttttttatatacgatgtgctaacataaattgcttgaacttctcagctgcaggcgttagtgtttggtttttcgcgaccgcaagataaaagaaccgctcccagtttgggcttctaattggtaagactttgacatccacataatttaaaatcggcatgttcggaactacagcaatcccaaagttttgcgcgaccatcccggcaatgacttgatccacttcaatttcatatgcgatttgataatcagcgccaatttttctgaataactcatcgataattggacgcaaaccactttttttcgagaatgcgatatgcggataatctaccgtttcgattaaatcaatccagtctttctcagcaagcggatggcttttagggacgatgagcactaattcttgtttggcaattggtgtaaagtgaatatttctttcattttcaagtttagaacaaataccaatatcaaatttcttttcttttaggccttgaatgatatcaatcgaaacacctgtatggaaaataaaatcgatttgtttttctggttcggtttggagaaattcttgaacaagctttggtattagagacgtgccaagtgtttgcaagaaggccaagtcaatctgcccttccccatttgccgctttcttagtcgttgcaactcccgcgtcaatcatatctaaagactcttccacataatcaagaaatactttcccagccttacttaaacctatattccgcccttctttttcaaataaagggatacctagttcttgctctaatgaggaaattgcgtgacttaaactaggctgtgtaatcagcaatttttcagctgcttttgtgtaatgctccatgtgcgccagtgtgacgaagtatcgtaaatggtgtaaattcatgcttctctcctaactaaaaagttatctatgcaatttatctatcaattaatagaacaataccaatttgtttttatggaatagtcataatacaattaaactgtagttacgccagtgaaacaaactattccttaaaaaccaatatacggtagaataggttaactgtccagttccatttttaactattgaaggcgttatcacatcagagatttttaatttagtggaatttatttttttactggtgtttgtgaaaatattatcaaagtttcttgtaatttttattatggagaggagataatttttatgacaaatgcaaatggcaatctaaaaaaatgccccatcacgattagctcttacacactaggaacggaggtatcttttcctaaacgagtgaaagtcgctgcggaaaatggttttgacggaattggcttgcgtgcagaaaattatgtagatgcactagctgccggattaaccgatgaagacatgttgcggattttagacgagcataacatgaaagtaacagaagtggagtacataacccagtggggaactgccgaagatcgtacagcagaacaacaaaagaaagagcaaacaactttccacatggcgcgattatttggcgtcaaacatattaattgtggtttgcttgaaaaaatccctgaggaacaaatcattgtcgcgcttggtgaattatgtgaccgcgcagaagaattaattattggtttagaatttatgccatatagcggtgtagcagacttacaagcagcttggcgagtagcagaagcatgcggacgagataacgcgcaacttatttgtgacacatggcactgggctagagcaaatcaaacagctgaatctatcaaaaatgttcccgctgatcggattgtttctatccaactatgcgatgtccacgaaacaccttacaaagaacttcgtgaagaatcacttcatgatcgtttagctcctggagaaggatacggagatacggtcggttttgcaaaaattttaaaagagcatggtgtaaatccacgtgtgatgggagttgaagttatttcagactctatggtagcaactggtttagagtatgccgctcttaaagtatacaatgccacgaaaaaagtattagacgaagcatggccagagatttctccacgctaaacacctacttagttatgtgaaaatgataacgtagtaggaagactccctgtgaaaggaatgtgttatttttgaaatttaattcgatgttttcacctattgatatcgggccgatgaaagtgcctaacagatttgtcgtatcaccaatgtgcaacaactatgcaaatacagatggaactttatcagacacttcccttgcttactataaagaacgagcacttggagggttcgggcttattacttttgaagcaacggttgtagatgtacgcgcaaaaggtggcgcaaataaagcttgcctatatagtgatcatcaaattgctagttttaaacgagtgattgatgtatgtcacgatgctggagcaaaaatttctgttcagttacagcacgctggaccagaaggaaattccaaagtatctggttatcctttaagagcagcctcagcgattgcctcggctgcagggcgaaatactccagaagccatttcgcgagaagaactttatgagttgattgaactttacggagaagctgccttacgagcaaaaaaagctggtgctgatgcagttgaagttcactgtgcacacggttatttagtaagtagtttcttatcggcacggacaaacaaacgtgtagatgaattcggcggctgttttgaaaatagaatgcgattacctcgacttatcattgaaagtattcgtaaacgtgttggtcattctattgcaattctttgccgaattaatagtactgacggtgtcgacggtggattaagtgttcaagacagcgcgacggttgcagcttatttggaagattgtggtttggatggtttacatgtctctcgcagtgttcatattcgcgatgaatacatgtgggcgccaaccgtcttgcatgctggatttagctctgatcttgtaacgcaaattaaacgcgctgtttctatcccagtaattactgtgggtcgtttcacagagccgcattacgcggaattaatggttcgtgaaggccgtgctgacttggttgctttcgggcgtcagtctttagcagatccagagacaccaaacaaagctgcagcaggaaaactagacgagttacttccttgtattgcttgtcttcaaggttgtgtggctaacatgtacgccggaaaaccaattacttgtctagtaaatccattactcggacgtgaatccgaagcttacttaccaaaaactccaagtaaaaaagtggtggttgttggtggcggcgttggtggactttatgccggatggatggctggatcccgtggtcatgatgtgacagtttatgaagcatcagatatgattggtggtcaaatgcgattagctgcctatcctcctggtaaaggcgacttaacaaatatggttcgtagttacattaaaaaatgcgaacagtttgatgtcgaaattaaaacaaacacacccgtaacattagaacttattcaagaagttgcaccagatgctgtcattattgcaactggcgccactccactagttttaccaatcccaggtatcgaggacgcaggattgattcatgcagttgacttactggatggaaaagagaaatgtggtcaaaaagttcttgttgtaggtggcggtatggttggtagtgaaacagctgcatttttaggtgaggctggtcatgatgttaccgttgtagagcttcgcgatgaagttggggcagatgtcatttctgagcaccgtaagtttcttatgcatgatttcgatgaatataaaatcaaaagtgttactaatgccaaagtaacgagtttctttgaagacggagtaacctattccctagctgacaacaaagaacagcgaatcgatggttttgactctgtagttctagcaatgggatcaagagcctataatccactagaagaagctattaaggcaattgtaccggaaacctatgttatcggtgatgctgtacgcgcacgccgcgcactcgacgcaacgaaagaagcacttgacgctgtattacaattataatttattgtcctactcgctctaatatgtagcgagtaggattcattcggaggaaaacaaaatggaaaatagaatttcaggaacgactaggcttcttggcttaattgggacacccatagaccattcaaaatctccaatcatgtataattacagttttcaaaaagcgggtttggattatgcttacctagcctttgacacacctatccaaaaagttgcagatactattaaggcaatcaagacatttaatcttcgtggtgcaaatgtaaccatgccttgtaaaagtgaagttttaaaacacatggatgacctttcccctgccgcacggatgattggcgctgttaacactatcgtaaatgaagacgggaaactaactgggcatatcacagacggccttggttttattgcaaatttgcgagatgctagtgtagatgttgccggcaaaaaaatgactataattggtgctggtggcgcggctacagcaatccaagtccagtgtgcacttgatggggccaaggaaatcaccatttttaatattaaagacgctttttatgacaaagcgaaacaaaccgttgcttctattaaacaagaagtcccaaattgcatcgtacatatttatgatttgaacgatacagaaaaactaaatgcagaaattaccactagcgatatccttgttaatgcaacactcgttggtatgcatccgaatgaacatgaaacacctattagcgatacatccgtttttagaaaagaacttatcgttgcagatattatttataatcctaaaaaaacgcaacttctactagatgctgaagctgctggttgtaagactgtaggcgggttaggaatgcttttgtggcaaggcgctgaagcatacaaattgtttactggtaaagatatgccagtttcagaagtaaaagatctatatttcaactaataaattcatcaggatttcgagaggagaaaaaaatgaacgcaaaaagattttatccaacagcaatagcactttattttacttattttattcacggtattggggtatccattcttggccaatacaaacaagatttcgccggagtatggggagcagataagctttctgacggtacatttgatgtaagtatggttatcgccgttatcgcagcacttggtttagggcgcttgctgacattaccaatttctgggcctttttcagataaatttggacgtaaaccttccgcattaattggtgttgggttatacgcagtttatttcatcggtcttgcctttgcaccgaatatgtatatcgcttacgctttcgcttttgtcggaggagcagcaaactcattcttagacacagctgtaacgccatctgttttagaaattttcacaaaaaatggcgcgattgccaacatgtttactaaattctcaatttctatcggacaattcgtattacctttcgcaatcggtatggttgcggcggcaaatatgtcattccgtacactattcgttatcacaatggctttaatcgttattgacggcttaatcattgcatttatgccattccctccaatgaacaataatgttggcggcgaaaaagcaaaaccagaaaaaatgaaattcaatgcaactagttgggctattatcggtattggttttacttgtacctccactttccaactctggctaaactgtaaccaagaacttggaaaattatacggcatggctgatccgagtaaaattcaatcattttattcattaggaacaatgtgcgcaattttaattaccgctgttctcgtgaagaaatttattttgccagtacgtattctaattctttatccagcgattgctacattaatgctactgattatttatatcgtacaaacacctactatttgcttaattggtggatttgttatcgggtacgctgctgcaggtggagttctacaactagctgtatctacggccaatgaatttttcccaacgaacaaagggaaaatcacttcgattgtcatgatttcttccagcctagcaaactatatcgttttaaacgttgcaagttatattactaaagctggtggtatcgaaggtccaaaatatgtgttattattcaatgtagcgataactgttattggtatcctattagcaatttttgttaatatgcgttacaaaaacgaatctaaaattgctactaaataatttatttttcaactgagcatttatgatgctcagttgaacttacatatcatttgtgaagtaaagcacaaacttatgtattttatctatatgaactcactgaaaaagagggtatttttaataaaaagtcctcataagtcattacataaaggagagcagactatgaaaaacaaatatttatctacatcacttggtctttatatgaactactttgttcatggtatggcgttaatcatcattgcacaaaacattgattttttatctcaaaaatggcatacagatttagctggtgctgccggcgttgtatcttcctttgggattggtaaattattagctgtatttatttcgggaagactatccgataaattcggtagaaagttgtctgttattctcggcgtgtttttctacattgtctttttaggaggtatattactcagtccaaacacgattattgcttatatgtttggtatttctgcggggatagctaattcattcctagatactggtacctatcctgcgctcatggaagcttatccaaaaaaagccgcttctgccaatatcattgttaaagcatttgtacaatctggtcaattccttttaccgtttatgattgcatttattttggcaaataacttatggtatggctggagttttattgtattaatcgttattttactaattaacttactatatactttgacgcgtactttcccaccgatgactgttggaaaaccactagatgtagcagaacttgccgaagagaaaaagcagaagtttcattttagtatagatgaaatttgtttgattttatttggttttgtagctcaaactcttctctatattatgagccaatggattgctaagtatggttcagaagttattcatatgacagacgatgcttctagactacttgtaagttatgccagtgttggagcgattatttgtgtgtgtgtgacgtttgttttaggaaaccgcggcgtacgaacgctccatatcttaattacttatgtaaccatgacgatgcttatctcctttacactgtttgctttcccaagcgaaatcgtatgtattgtcggggctttcttattgggctatttctctgctggaggaattatccaattaggtctaacactacttgcggaggtttctgctcgaggaaaaggttttgtcactagtctttatactattgcagaagggatagctgtatttattatccccttgattgctgctgctatttcccgaattgatattgccgctatctttttactaaatgctggtattgcgcttttcggtctcgctctcttaatgattgtatttacaagaaagaaaaaatttgctcgagatcatatttaaaaagaccgagaattgattcgtcaattctcggtcttttttaatgtttccgtaacgttttccatttgtacatgagcatccaaaaagcaatgacagaggcaactaaaattagtatgattttaattattaaacttataacttgtcctgtcggaattaattgatcgtaattaaaacttgcataatgaccacttaaacaaatagtcacataaagagagccaatgataagtatggggagccggaatttattattcatcaaaaatctaccattgttttccaaagaagctgttttcattgcataccagctaatggttaacattcctattgataaaataattaatacgccaaattcacttaacgccgtagttccttgtaaaattggtgttggtattgcgttatacagcataaccgctccaccgtcaatatccactattgtttttccagtaaagaaagctttaaaaccaatgattaaattagtcaatgcgcctggaaacatgtataaaaagctaacaatggacccaattgctataattccggctgtaattatttctccaaccaaattcccaactgccattgctaacgtgtaagagaacaaatacaataacaaaaaggaactaatatacataaatgaatcacttacactgggtaaatacaaccccggtatttgctgataaatataccaaaacctacagaaaatgatgattggtactagtacgaaaattaaaagcaatggaataagcatcttatgccaaaaaatttgctttttggagtatggcaatccaaaagtaaaataatccatttgcttatttttctcaaaaacagttaactttaatcctaaaaacagaaacacatagaagaaaagccctaaattcccttcaaaatcataaggagttaaacttaaatcattttttatttcattacccgtcatttgttgatctgctgtattatttttttgaaattcttcagactgataatatttatagttatcattaaacatactaaccgtattagttgcagtcgtagcttcagaacctataaaagcgattacgataaatataaatacccacgcattctgacgccattctttccaaagaagccctgtactcataatttctcgcctccttgttcttctagatgataaataaacaagtcttctaatgtgactgcgagttcatccatgaaaataggtttttctttttttattgctgcgtataattctgtgttcatatctcggaataaaatggtgtaaacacggccatacttattaattaccttgccattttccagtaaaaagtgtgggatttttttgttttcaaaagcgatttgaattttaactgcttgttcccgcagtgattcaaggtggtaagactcttcaatatgattatcttgtaaaatatgaatatagtcagcaatcggatctaaatcagctaaacgatgggaagaaataataatgcctaatttccgcttctccacttcttctaataatatgcccataattttcttttgagcaattatatcaagtccctccattggctcatcaagcagaataaattcggctcctatggaaagagcaagaacgaggccaaaaagccctttcattccctttgaataattttgaaactttacgtcttttgctaggttgacttgcttcattaaattatcaaatttgtctccatcaaatagtgggtacgttttttgatagaatttttttattgtcgggattttataaccatcccaacaatttaaattatcttgaagcataaatagtttttgctttagttgatgatttttgcttaatggctcatccagatacacatcccctgcatcagggatataaaagcccatgatggttcgaaaaagcgttgttttacctacgccatttcgtcccactataccaataatttctccaggttttacttcaaaagttattttatccagcaagagttttccgtcaatttttttgctaagagaatcaaccttcaaccacgtcacctccaatgatgtcttgactatattcgtctgctaatttatgtatttcctctatgttaactccaaggtaaactaaatcgagaatggtttcttttaatttggtccttgtttctgctaactttttgggcgagctcaatttatctgtttggttcgctatgaaggtcccttttccttttactgtaatgattacttcttgtcgttctaattcttggtacgctttactcacagtgtttgggtttactccgattctactagcaaattcacgtatagataatatcttttcgccttcttgaagtacccctttgacaacttgttctttaattttttggacgatctgttcataaatcggtagttgactttttgtgttaatcgtaaacatctctccccccgctttcatgaattctactatagagaactaattgtactagttactatagtacagtagataaaaaaataaatcaattctcttattaaaaagaaaattgatttaagtttgctttttcaagttttaagagtgattctttcatccctattcccccactataacctgttaaattaccatttttaccaattactctgtggcatggaataatgaaaagtagtgggtttctgccgattgttgttccaactgcgcgaacggctttggggcgatttatcagttctgcgatttctgtatatgttctagtttctccataaggaatagtttttaatgcatgaaatacttcaatttgtagaggagtagcggacaaatcaattggaacagtaaaattcgtaagttccccgtgcaaataagcagctaattcttctttatatatgttcattttttctgggcttcgctttgctgattgaagcttttccgcctttgttccaacgtaaactaaccccatttttgtcgctgcgaaataaagttctgtgtctgaaaaatggagcgtatcataatataaatctgtcatttccttcacctctttctaatattaattatacgccaaattgaataacattcctaaccagtttcactataagagcaagattagaaaagtttttctcgcaatttgccttcataacgtttatgattaataagaagttgaggtgataacattgtcggattattacttaaccaaaaaaagatggcaagcaatttcaacaaatgacaagactgctgatggtgcatttttctatggcgtcacatctacgaagattttttgctatccttcatgtaaatcaagattacctaaaaaagaaaacatcgttattttccatagtgcggaggaagctttttcgcatggctaccgcgcttgtaaacgatgtaaatctggtggtagtgctctgcctgatacggagtgggtaaataatatcgaaatgtatattaaagaaaattttgccaaggcgctcactttaaaaatcattgcggatgattgccacggaagcccgtatcatttacaccgaacgtttaagcgaatcacgatgattacacccattacttaccttgagaacgtccggattaattatgcaaaaatgcagctaaccacgaccaaccaatccattgaaactattggaaaaatggctggctttccaaacccctctcatttttctactacatttaaaaggcataccggtttgtcaccaaaccaatttcgaaaaacaataataaaaaaactaaattagaacggatgatatgaatatgacacatgtaacattacccattttagaagattgggaaggcctttcactaactactattttgcaagaaaaattccatctcggtaaaaaagcgcgacatgaaattcgcatgtctcaaaatgttttactgaacaataagcccctggacgattggaatacgccacttttcgttggagcgagtctttctttaccaatttttttacatgacaaaatccctgtttatgagtatgacttagaaattatttatgaagatgattttttactagtagtgaataaaccagttgatatgaaaactcacccaaatgatagttatgaaacagatacttgcgcgaatgccgtgcaatattacttagaaaaaactggccaagatgcgaatgccttagcagttcaccgtcttgatcaaactacttccggtttagttctgtttgctaaaaacaaattagctatcgccggtttatcttggcaaatggaaaacagagcgattcacaggacttatcttgcggctgttgatggcacttggggactcgtgatgcagactatcaacaaaccaatcggtgaagatcgtcaccacggatcgagacgccaaattagcccatacggccagccagcagtaacacatgttaaagtattagaaaatgataatgaaaaaaacacctctcttgtagaatgccaaatcgaaactggtcggacgcaccaaattcgcgttcatttaagcggaattggccatccaattattggcgatacgctttatggtggttctcctcgtgctaatcgcatcatgctacatgccgagaaattacatttaaatcatcctttcaaaggtaaagaaatgaatttttctgctccagctggagatgattgggtattttaaaaagccacaacattatgttgtgacttctgtacaaatttctacttttattccattaggatcttcaaaaaatacagcataatgatttttaccgccagcaaaaggatatctttcttcatatagaagtttgattccttttgcttttaatttaactcgaaaatcatccacgcgttcttttgtaccaccatgaaaagctaaatgattgagcccaactcgtttgcggtggtagccttcagaaataaatggttcctccgtttgtacaaatactaaatacgtatctgcgtatttataactaaaaccttcattccaagactgatagaattcataagaaagttcttctaacagccatgaccaaaacaagcgactctcttctaaatcagctacataaatttccacatgatgtaacatattacgcctccccgatatgtttaagcgcttctcttcgacttagcggcgcaagcgagtggctatttacaaactgacgaactgccccgctatccactttcgcatattgtcttagcgcccatccaatcgctttttgaataaagaattctttggacgcaagccatttttcgcaattgaaaaaaagtaaatctacatcggttttttctttgtacttcaattgaaataaaatcgccgttcgagcgagccaaatattatctccgtttatccacgcttcattataggtaggaatcaactcaggatatagtttaaaatgattacttactacagttcctgctaggccgtccacagtatcccaccaagatttcgttacaattaattgctcatatacttttatcgcttcactgggctgttttttaccgtaacggcttaataaatcaatcgccacatactgaaattcacgttcttcttccgcaaataatgctatcgtaaattcaagcaagtcttgcggcgccccattttctttcaaatatgcagctactaattttttccgttccccagctctaatccctaaaaaagtaaattggttcttcatgtatgcttccattggcggagcatctgttaaagaacgattcgttcggaataacgtttgaatatctgtcattcctcgttctcacttgctaaataagcgcgttctctctcaatactacttaaaaagtattctaaatcatctgggtctggcccaacacgcttccccgtttctaagcgatcaattttttccatatcactggcatctagttggaaataagacaaacgtgaattctcctcaatccgactagaagtaattgacttcggaaaaataatcgtattgcggttcaagtgccattgtaaaatcacttgatctacagatgcttgatgttttttcgcaatttctgtaataactggattttgcattaagatcccttttgcaagcggcgaccatgcagcatgcgcaatattctgttccaccaaatacttacgaagatcattttgcggtaacagtggatgcgtttccacttgatttaaaaccggtttttcatttgcagcaaccaataaatcacttaaatgatgttgcttgaaattcgcaactccaattgatttaatcaatttttcgtcatgaagccgctccatcgctcgccatgaatcgcgatatttcccggcaacgggccaatgaattaaatacaaatccaaataatccaacttcaaattccgaagtgtccgctcaaacgcaaataacgtttcatcgtaaccaaggtccccgttccacacttttgaactaataaataattcttcgcgcgagaccgcactacttgcaatcgcctgaccaacaattgcttcattattataaactgctgctgtatcaaacaaacgataacctacttcaattgccttctctacagcaccagcgataaattcttgttctgttacttgaaatacaccaagtccaatataaggaattgtcccattccccggtagtatcattctgtcttgtaatgtttttgtcaaaacgaaaccctcctcacgaaaactgttttgtgaactttttctcttaaatgaattatacactattttcgcaaatttatattttaaaaccagtataccgaaatgagccttactctcctaataaaaagccacaaaaaatctactttttttattcatttagtgaaatacctaaaaacagccattggaaacgctgtcagaacgtttatttacgcaactatcaaaaaaaagtttcctatttattcccatcctatgttagtattaatttgtggtaaagatctatcaagttttttatttgttttcgttaacttatcgttaagaaaaaagctcccttttcaaagtaaaagcgagctgattattaatgaccaaaaatgatcgggggaattaagaaaatggcttttaaaaataaaaaagaccgttttgcttcgttgttgcatgacattgcagtaaatttacatgaaggtgcaaatttctttgcaacttacaacattaattcggtggaggatttacatactttctcgaataaaatcaaagaatatgaaacagctggagactccatggttcacaaaatgattatggaattaaacgacgctttcattacaccaatcgaacgtgaggacatgttagaacttactaaccgcttagacgacgtaatggacgcacttgatgaaacagctttctcactcgaaatctgccaaatcactcattatgatgaatacatgactaaatttatccaagctattcaagcaagcactgttgaaattgaaaaagcagttgatcttgtttttgataaaaaactaaaagatgttcgtaaacttgcgattcaaattaaagattatgaatctcaatgtgatgatgtttaccgcgaatcactaatccaacttttccaaaacgaaaaagatccaattaaactaattcgtctaagagaagtttatgaaaaattagaagacattgctgatagttgtcaaagcgttgcgaatacgcttgaatcaattgtcatgaaaaatgcgtaaggggcctagatagatggaaggaatgtttctcatcaccctcgtcatcgtacttgccgcgctagcatttgacctaatcaacgggtttcatgatacagctaacgcaattgcgactagtgtctctacaaaagccttaaaaccacgacatgcgattatcctcgctgccgtaatgaactttgtgggtgctatatcattcacaggggttgctaaaacaattacaaaagacattgttaacccatttgacttagatcacggggaacttgttattttagcagcattactttcagctattgcttggaatttaatcacttggtatttcggaattcctagtagttcctctcatgccttgattggttccatcgccggtgcagcaattgcatcagctggatttgcagcaattgaatacagcggatttactaaaatcatcattggtttattagtatcccctgtacttgctttcgtagtcggttacacgatatattcactcttcaaggttttcttgaagaacttaaacttagccacgaccaatcggcgcttccggatgattcaagtcggaactgccgcactacaatcttacacacacggaaccaatgatgcccaaaaatcaatggggattatcacaatggcattaattgctagtggtttccaaacaacggatgatgtgcaattatgggttcaagtatcctgtgcgattgctatggcgattggtacgagtattggtggttggaaaatcatcaaaactgtcggtggtaaaatcatgaaaatcaaaccagttaatggtgtagcagctgatttaagttccgttatcattatttttggtgccactttcattcatttaccagttagtacaacacacgtaatcagctcttctatcctaggtgttggaacagctcaccgtgttaaaggtgtcaaatgggatactgctcagcgcatgattattacatgggttatcacacttcctatttccgcaacgattgcagcacttatcttctatgtgctaagattcattctttaataactgttagagccttgcttatgcggggctctttttatacatatttttgaataaaatgaataaatattagtataaagcaagattattttaaaaatatattgcatatttaatcattttgatgtattataataagcatcgataataacgattcattgattataaattactcaaatactaaagggagttgtacttatgcagaagcatttattacaaaagtttgcagcaattttacttgtttttatagttgtattttctggcttcacatccgtgttcgccgctgatactgaagatcaaactttagctaaaattcaagaaaaaggcgttttgacggttggcctttccgctgactatccaccgtatgaatttcatcaaacaatcgacggtaaagataaagtcgttggttttgacgtaagtattgcggaaaaaattgccaaagatttagatgttaaattagatattaaagaaatgaactttgatagcttacttggttcactaaaaaccggcaaaattgatatgattatttcggggatgtccccgacgcccgaacgccaaaaagaagtagatttctcagatccatacatgttcgttcagcaacgcgttgtgattagaaaaacggataaagataaatttacaagcgtgaatgattttagcggcgtaaaagttggtgcccaaaaacaaacgacacaagaagaattagctcaaaacgaactagttggttcagaagtagtttcccttcaaaaagtaccggaccttattcttaaccttaaaagcaacaaagtagatgccgttgttttagaaggccctgttgctgaagcatatattagtcaagataagacactcgctatggcggatatcaaattttctaatggtagcaaagaaacagccatcgcaatgccgaaaggttccactgctttacaagaaaaagtcaacgcctctattaaagatatacaagataccggcttactaaaagaatatcaaaaagaagctaacaaactaatgttccaagatggtagcttttacgaaaaatatggtaattactttgtcactggtacattaattaccattgcccttgccgctatcggcgtgttatgtggcgccattcttggctcattactcgctctcatgaaactagcgaaaacaagatggttacgctggccagcagcatgttatattgaatttgtccgtggtacgccacttcttattcaaattttcatcgtctttttcggaacacaaattatcggtatggacgtatccgcctttgtttccggttgtatcgccctatcgctaaacagtgctgcttacgttgctgaaattatccgcgcaggtatttctgctgtcaacaaaggtcaaatggaagcagctcgttcccttggtatgacacaaggagctagcatgcgttacatcatcttaccgcaagccgtgaaaaatattcttcctgcacttggtaatgaattcgttactgttattaaagaatcttccatcgtatccgttatcggtgtaacagagctaatgtttatgactggcgtagtccaaggcgcaagcttcaagccatttattccgctaatcattacatcgttaatttactttgtactaacatttagcctgtcgagactactaggtgttgctgaaaggagaatgagaacaagtgattaatattaaaaatttacacaaacattttggcaaattagaagtcttaaaaggtattgaccttgaaatcgcatctggagaagtggtcgtagttatcggcccttccggaagtggaaaaagtactttcttacgttgcctgaacttattagaacaaccaacaactggtacgattcttttcgaaaacaaagacctaatggcgaaacaaaccaacgtcaacgaacttcgtcaaaaaatgggcatggttttccaaaatttcaacttgtttccacataaaaacgttcttgaaaacctaatgttagcgcctatgaaagtgaaaaatgaagatagtgcagctgcgaaaaaacacgccctttctctccttgaaaaagtcggtctagctgataaagcaactagctatccttcccaactttctggtggacaacaacaacgggtagccattgcccgagcactcgcaatgaatcctgacgtaatgctattcgatgaaccaacttccgcactcgaccccgaaatggttggtgaagtattaagtgttatgaagtcacttgctaaagaaggtatgacaatggttgtcgtaacgcacgaaatggggttcgcaagagaagttgccgaccgtgttgtcttcatggatgctggcgtgattcaagaacaaggcactcccgaagaagtattcggaaacccgcaaaacgatcgtacaaaagactttttaggaaaagttttagcataaacaaagattacgtcttgcctattttaggcgaggcgtttatctgcacttatagaaaaaaggagctaattatacatgatgaatcactcaaagattgctaaaaaacatcaacaaatgcctgtgaacattctcgctgatattggcacacttgcaaaaacaatgcctgatattctcgatttatccatcggtgatcctgatttaattacggatgaatcgattattaatgctgcttttgaagacgttcgtgctggtcatacaaaatataccgaatccggtggcgacgtggaactcattgatgctattcgtggttattttagccgtaattacgatctttcttttgaacgtagccaaatccgtgcaacagtcggcgcgcttcatggtatgtatttaactttgcaaaccattcttgacgacggcgatgaagttattattcatgaaccttacttctcgccttataaagatcaagtattgaattctggtggtacaccaatcattattccaacctacgaaaaagatgattttgcgattaatgttgatattttagaagcagccattactgataaaacaaaagctttaattttaaattcacctaataatcccaccggtgctgttttttcaccagaaacctttgaaaaaattgctaatctagcgaaaaaatatgatttctttattttatcggatgaagtatatgatggttttagtttttatgaagacttcgtaccaatggccaaattcgcaccggaccatacgattacattcggtagtatgtctaaaaacttcgcaatgaccggttggcgcttaggatatatgattgcccctacttatttaaacgaagctgcgaagattattaatgaaggaattacttattcagctcctacaccgtctcaaagagctgctatttacgcgttaaatcattctgagacactaattcctttagtagcagaaaccttccaaaaacgcctagaatacatcgcaaaacgggtcgaaaaaattccatatctttctttacatccacttaaaggttcgatttacgcctttatcaacatttctaaaacaaacatggattccgtttcatttacagaatatgtgttaaaagaaacgcaagtcctcgtaattcctgggctagcttttggtgaatctggtgataattatgttcgcctagctgcaacccaagacatcagcgtgctagaagaagcgttcaatcgcctagccaaattaacattttaatcaaaagagcaaactcgcttcataggcaagtttgctctttttttattttaaattgatttctgcaaaagaagaaacaaccgtcgcctcttttggaaaagtgatgttttttgtagcttcattcggtacgatatacacttttaacccagcctgcattgctgacagcgcaccatttttggaatcttctatcgcaacggcttcttctggtttaaccccaagtgcttccactgcttgtaagtaaagtgccggatgtggcttaatttcatccacatggtctgccgtttgtattgtctcaaaatcagctaaaatacccagacgattcagcgtaggctcaatccagtcaaatcccgaacttgttgcaagacctattttgtaatcattcgcttttacttgttcaaaaaactctttaaaaccatcacgaaagccaagtgattgttgaccaagatgacaagcttctgccacagtagttaaaaatgcttccttatcaaaagccccgttcgttgcttccatcatatagcgaataattggttcttcacttgtcccgataatttgttgataaacttcatctggcaaatcaataccgtacgtctctttcaaatagttcattgtctccgtataccataaattttccgtatcaagcatagttccatcaaaatcaaaaacaaccgccttcacatgcatcctcctagtataagtgatgcttttattgtaacatagataaactatttaagaaatcttcgaaaaagggttgcttttttagcaaaaaacgaataatattgtatttgtggtttttaatgttcgtcatttaccattaagcatgattttaaaaaaggagtgaaacacacgcatgtttcaattaaaggcaaacggtacagatgttaaaactgaagttatctctggttttactacattcctaacgatggtatatatcgtagtagttaacccagcaattctttccgcagcaggtgttccattcaatactgtattcatggcaacaatcatttcagcagttatcggtacattatggatggcgattttcgctaactatccaatcgcgattgcgccaggacttggtatgaacgcttacttcgttacagtcgttacaacacaaaaactagattattcggtcgcattcgctgcggtctttgtagcaggtattattttcttattactatctttaacaccgcttcgtgaaaaaatcattgaagccattccacataatttaaaagccgggatcacagctggtattggtttatttatcgctttccttggcttccgtatgacaggtattatcgtttctaatgattccaacttagtaggtttaggtgacttacattccaaagaagctattttagctattgttgggcttttaatcactttaatcttgcttgctttaaacgtaaaaggggcattattcattgggatgattgctactggtattattgcttttatcactggtgaactgaaatttacagatggtatcgtcaaacttccgccaatgccagaatttgtctttactaatcccattcacgctttcggtgatgtgatgagttacgggctctatgccgtcgtcttgtccttcttactcataacgatttttgatacaactggaacaatgattggtgtcgctaaaaaagctggcttgatgaaaggcgaatcactgccaaacgccaaacaagctttaatggcggatgcagttgcaacaagtgttggttcgatgtttggtacaacgccaacaagtgcttatatcgaatcatcagctggtgttgcaactggtggacgtacggggcttactacccttacagtagctatcttgttcatggtatcagcattcttcgcaccacttgttggtgctgtctctggaatttctgctattactgcaccagcacttatcgttgttggtagtatgatgattggtgctgttaaagaaatcgactgggatacattagatgaagcattccctgctttcttagttattctagctatgccacttacttcaagcatcgcaatcggcttagcattcggatttatttcttacccagtattaaaagtattcactggtaaatggcgtgaacttaactggttcctaatcgttattgccgtattattcttcattctcgtagcatttttaccacattaataaatagtagcgcctatctgaatacaggtaggcgcttttttattggacaaaaacccgctcttttgctataaagaagagagaaactaattagaaatgagttgaacttgtcgtgtttttaaaatcactgctcgccggtgtcgcacttgctgttgttgtttttctagcaagctttttgatgcctgactacaccgtatccactttatattccattgtaacgactatcattgtctttgcatccattattctatccgcattcgtatcctttggtggtcgtagtggaaaccctagtcgaaaaagccaattacgctggagtatcctgcttttagtggcagcaattcctagttttatcggctttatcgttactttttacttttaaactaaaaagaagcattccccatttgaggaatgcttcttttttaatcttctaatgcagaaatgaacgctggtaaatattctggtaaatctggtgggcgacggcttgaaataatgtgaccgtctgttacaacaggctcgttatgccaaatagctcccgcattcgtcatatcgtctttaattcccggcgtacttgtgacattcacaccttctaaaataccggccgaaacaagtacccatccagcatggcaaatttgtccgattggttttttcgccttatcaaacgcacgaaccaaatttagtacgctatcaaaacggcgtaatttgtctggggaccagccacctggaactaaaatcccatcataatcttctgcgcgaacagaatcaaaatcataatcagaagtaacagggactccgtacttaccgtgataaaccttttttgcttcctctgcaactaaatgcacagaagctcctgcctcgcgtaatctaagcactggataccaaagttctaaatcctcaaagtcttcacttacaagggcaataacttttttaccttttaaagtcatataaatctcctcctatcctcttctacagtataacaataaccagattgttattaaattattccgcctataaaagaagacaaaaaaagacgctcgaaataaacatttccagcgttgccatcatgttcgggcgcctatgcataacgggatgaggcatagacatgaactacacggccaatgagatgaatgaaaacaaataatgattttggtgtctaaacagatgtctgactagttgccattctattggaagatggatacaccaaaagtcattataaccatgatagggtcttatccccatgaaaatcacattagtaaaaatgaaactttcatcgaggtaaaactctatcctataacttattttactattgttcttgaaaaaagcaagtaaataaatatagattttttgtgacgaagataagaaagatgagaattgcctcactattattgtcgttttctgtataaaaattactatattacaaataaaaaggaaaccattaaaggtccccttcaactaaaaatttctacaaccatccaagaaataatagcgactaatggaattaagacccatacattatgaccaagtaagctagagcgaacatctggtttatcttcgagtagttgaattctatcgcgcaagtcatgcacttcaagctcgaggtcctgtactttatcttcaagttcgtataaacgttcttccattttaatccctccacaccttttctattgcctattatacgccaagcactatgaaatgcatcgttccataggctgatttattgctaatttattgtcataccgttcaggcatttgctacaatgaaagaaaactatcaactgttggggtggaaaaatggaaattcaagtagaagaagctgttgtaaaactcattttgcatggcggaaacacacgaaaagaagcatacaaagcaattgattttgcagaaaagtatcaattcgatgaagccgataaacatctgcaaatcgcacaggatcaattccaagaaggtcatatttggcaaacgaaattagtatccattcgcgactcagaaacggtagctcatccttcctttttacttattcatgggcaggatcacttaatgaccgcacaagcagaattgcaacttgccaaaagaatcattgaacaatataaacatcaacaacgcttagaagaacgacttactaaacttgaaaatcaagcatgagatgtagctgggaataagaaataattctcattcgtaagtatattcgggcgcacaaacaacatatcttccgtttcaataatatgcgcggcatcaatgtatttgcttttttccggtgtgaaaagaagatgaattgtttcgatttttttgataggtagataccttagaacttccaccacatctagttttttcgtactaagtatatctagcacatataaatcagcatcttcttgctccattaatacaattacatctaattcttctatataataaagctcatttttcaaggcaatcaatacataaaacatcagtaaatcttcactttctcgaacatctagaatattagaaagtggcgttttttcggatacaatacgacttattagctgaaaatccgttttattaccgggattcagcttttttaaattactagattctcttttcaaactgcaagcatctacagtaaaactgctttcctccacacgctcaaatccaaatttcgggtaaaaatccagtacagtatcattcgcaaatagataaagaaaatcatactggtcttcgtatttggctattacatgctctaataatttcttagcaagcccctgcccccgataatccggatgcgtcattactgtcccaatttgcaaggcgcggtaatcttccccttggtaaattagattcatcttattgatagagacattcgcgattaccttgttatcatcaatatatgaatagcaaatatacttatcattccaaaagccgtccctgtaccattcttcaaaattaatatcaaatgtactttcagcaagcctattaaaactatcacgatacattttattatctttataatcacttatcatttcataattcatcgttctaatcctctattccttcgtataaaaataacaggtacaacgcgaaatacgtcctacctgctcatttttatttaatttaacgtattccaagcgctatttttgcatagcgtgacatacgatctttagtccaaggtggattccaaacaagatttacatttgtatccttcacttctggaatatcactaagcgccatctgtacttgctcagtcaaaataccagcaagcggacatcccattgttgtaagcgtcattgatactgtgcaaagtccgtcatcatctaattcaacatcgtatacaagcccaatattcacaatatcaattccaagttctggatcgataacttgttctagtgcgcccattagattttctttcagttgctcatccatgaagcatatgcctcctttttgccattttgtacatttattgtatcatatatgagaatgattttcattataagaatttctcaaaaaagctgaccccttgtagcattccttcaacggaaactttgtgttttgcattatcatcaatgataaattgcacattatctgccaagctttcttctactaatgtttggtataacttttcgctgtacgcaaaaggtaccacatcgtcttttttgccatgccaaagtaacaatggtcggttatttattttggtgatattttgagttaaatcatatttttgtagcgctaaaatccgttcatccacatcaaacggaaaagttaacccttgcgccaacgcatatttggatagctctttagcaaaatcaacataataggcacttcccattaaactaacggctactttaatattttcatatagcccaagaaggccaagcgaagtaatagctcccatggaaactccgccaacaccgatacgattcgcatctgttttcccagctttaattagctcatctgtaatcagcgggaactccgtaatattcgtttcaatcacatcccaaaagaatgtagcctggtcttccggatttgctccttgtaggcgctcgccatgtaacttcgcatctggcaaaatcacgcggaagccacgttgcgcaagtaaatagccataatgtaaatataattctttttgagatgtaaagccatgatagaagataatcgttggtaacattttatctgcattttcgctattactaatatgtaaaactggtattcccgcaatttgttcattttccacttgaatcattgtgaagcctcatttctattaggtttattaagctattgtaaaggtcggaatcatttacaaaatggtgataaacgtctatcattgatgtgtgcccttattttagcatgaaggggcagctttgaaccaaacatatgaattaaaggagcaaactatgtctaaaaaactaatcgtactagaccttgatggcacaacacttagagatgatttaactatctcttcgcatacaaaaaacactttagaaaaggcgcgcatggccggtcatgaagtaatgattgcaaccggacgcccatatcgaatcagtggttcttattaccatgagctaggattaacaacaccgattgtaaatttcaatggtgccgtgtatcatcatcctagactcactacatttgcggaaggctatcaccatgccattgatctacaagttgttcacgagttacttgatttttccaatggcttttcattagataatatcgcagcagaagtacaggataacgtcttcttaaaagaacgaaacaacagcgttcccgaaacattccatttaggcactgaaaatattgtattcggaaacatccgtgatgcgattaaatcagatgctacttcattattgtttttcggaaaactggaccaactcgatttaattagcaagcacttggatgaatctctttctggcgttatttctcatcacacatggggtgcatctgcttggccagctgtagaaattattaaatttggtattcataaagccattggcgtgcaagccgcagctaaaacacttggttttgaccgtaaagatatcattgcatttggagatgaaacgaatgatttacaaatgcttgattatgccggcgttggtgttgctatgggaaatgccgctgagtccgtgaaaaatgttgccaacgtggtaacagcatctaaccaagatgatgggatcgcagtctatttagaagaaaacttaaacttataataaaaagctgcaagtaatgtcttacaaaagttaggaatgctaatttttgattcaagagccattactttgcagcttttttacatcattttatttttatacatcgccattgctaatttttgatctgcttctgaacgaaaatcaccaaatacgcttgaggtctccataacattaataaatgctttagagtcaaactcgccaacaatgtgcgtaatatcatatagttcataacgcgtaatcaccataataagcattgctacatcttcttttgaatagccgcccattgcgtcaactaccgtaattccacgtaccatattttcatggattgctttaattactgtttcggaatgttgcgtcataatcatcactgtcaatttctgatgtcttgtatgaataatatcgatgactctactttgaacatataaagaaatgagcgtatacagcgcaaatgtccaatcatatgcaaagcctgctacaataataataactccatttaaaagcaagaagtatttcccgaaagaacgtcctgttttaatagtgatatacattgctactatatctagcccgccagtagaaataccgaattttagagccagaccaatacctacagatgcaattaatgccccaaaaatggcattaagcaaaatatcattagatacttgtacctccggaataacaattaagaagaaggacataaaagcaactgtcaaaaagctgaaaacagtaaatgatttcccaacttttaaccaacctaaaattgccactggaatatttaataacagaacgagtagccctgttgaaatagaaatattcattgaatcacgtaacatgtctgaacctagttgtgcaaccccatttaatccagctgcataaacttgtgctggtattaaaaagaagttcatgcctattgcgtttaaaagtgctgctattattgcaatggcggtttttttagcatactctttatatactatttttgaactcattttcttctctccttttttggccctaacataacataccaactttccagagaaaagagaagtctttttcattatttttttgatttttaattaaacaaaggatatccgcctgatagataaaagcctaatgagatggtaattactactacaataacaaaaatcatcaaaaacattcctgttggtttttgttgtttcctgtaactaagtagcatctccacaacaccaattacaatgattcccatcagaatcttaaatatcgccagaatccagctttgttctatgctgtatttgaccatcataattccactcaaaataaccaaaatataaaaaactcgattaatcatttgtaacattgtaaaactttttgtcgatttcgaataaatgagtagagctgtaatcgttagtacaacaatagccacccatgaaatcaaatgaatataaccccacataataccatccctcattcttattaagattttcttactttgttagtcagtgtcccaattttatcaatagtaatttcgataatgtccccatcttgtagaaaagtcggaggtgtcataccatttcccacaccacttggggtccctgtagcaattatatcccctggaagcaacgtatgccctttggataaatcagaaataattcttgctaagccaaatataaatttatcggtagagtcagactgtcttacttcgccattaaccttggtttcaatgtgaaaaacaggttctttgtttgcgttattttccaacacgaatggaccaatcgggcaacttgcatcaaggcttttccctaaataaaactgtttatgttttttctgaagatcgcgagctgtaatatcatttaaaatagtaaatccaaagatggcagataaagcctcttgttcagatatgtctcttactttctcaccaataataacagcaagttctccctcataatctaattggcccgttatattttgatgtaactcaatgttgccgttatgcggtaatagactattagcactctttgtaaatacaagaatatgctctgggacgtcttccttgcttcccatctctagcacatgattataatagttttttccaattgcaataatgttatttggcggaacaaaaggtacttgaatttccacttcggctaaatcgatatgcccgtcaattcctgttaattctggaacaagcggtttttctttaataaaatctaaaagggtagctggcggattcgaaaaaatcgttccagcagggatgattttattttcaggtgttaaaataccataagccaaatctccttcatacagataactcaaccatttcatttaaagaccttcctttgtgtttatttggcatatatgttgtccatcgaagaaatataaataagccgcagcgacttttttaccgctaatcgcttgaatcgcttctgcataaagcttgatttgaatatgatatcgttctttcattactttttcagcagcgttccaatcagcatatcttccttctattttatctgttttataatcaattaaagtaatcgtttcttcctcttctatcatactatccacaacaccttgaatgagtactcgttcgtctaaatcaactttttcatataactctgacacaggaagcaaataactaaatggcacttcacgttttactaaatcttttttctgcagcattgtttcccctaatggagattcaaagaaatctaatatttgtttgatattaattgctttaatttgcacatctgttaagatatctttttctcgcattgtgtgtaaaagctgttccaaatcttcctttgtcggtttataatctaacgaaactgcttgcataagcgtatgcattgccgtaccaatttctgttgcagagagtttatttttttgtaaaaatttaggtctatccagtgatactttttggaattcttttaacagtgtagtatcactccagctatcttgcaaagaaaattggcgcttaagctctgttacagactgtttagcacgtatttcagtcgccgcttcattttggtactcatactccatatatcgctgaatttcgtccttatatgggctttgaataggtactggctgatgttcttttatattttccagccaattatctgattcagccctttctagctcattagttagaaacatttcttttgtttttatttcaatttgtagtttcatctccgtcgcaagtgtttggattatttcttcacacaacaattctttaaaagcaggatgcctaatcgttgcgtttcctatccaatccaaatagcatttcgctttcgctcttgtggctgcaggtaaaatagtttctttttcttttgcgacttgcagccagtttttacttgttttttcaaaatccggtactgttgctactaaaatcaacttttcttctgcacgagtaagcgcaacatacaacacgcgcatctcttccgcaatcatttcacgagatttcttttgctttattgcttgctgcataattgttgggtaaacaatcattttctcaacatctcgataactagatgcaaagccataatctttatctaacaacgttttgctataaatatcccgcatattaaattttcgacttagcccagaaacaataactacaggaaattctaatcctttactcgcatggattgtcatcatgcgaacaacatcttctttttcaccaagtgtttttgcggtacctaaatcatcgcctcgaatttctaaccgttcaacaaaacgaacaaaacggaacagaccacggaaagatgttttttcatattggttggcccggtcgtataatgctcgtaaattcgcttggcgttgtttgccacctggtaagccacccacaaattcataaaagttagtttcttgatagatttgccatatcaatgacgttaaattttctcgaatggacaattcacgccaattgtttaattgttgaacaaaatcactaattttattcgctgtttccgaaacggttatgtccttataggttagcaatgcgtcatagaaataacccttcttcttcgccatacgaatttgccccaactcttcttcatttaagccaattatgggtgaacgtaaaaccgcagcaagcggaatatcttggtaagggttatctactactttcataagtgcaatcattgtagctacttctgttgtttcaaaataacctgagttattattcgcataaaaagggatatcttgaactttcattgcttcttccatatccggagcgctcgtcattgcccttgataaaataatgatatctctgtattgaataggtctattttgtttaagttttttatcataaataggaaacttattgtctatcatttctctgattttcattgcaatcgcacgtgattctacttgatttttttgcaattcttgaggcgataattcatcttctgtttcggtatcctcagttttcatatcaattagtaaaagttccgtttccatagcgtttgtttcagggaaatttgcacctaaagtcaattctgcggcggtatcataatcaatttcagcaatgtgtttatccatcaattgacgaaatataaaattggtagcatctaaaacttctttcctactcctaaagttctgtgacaaatcaatgcgtatcccgtttccactaccatcttgttggaatgtttggtactttgtcataaataatgttggctctgctaaacgaaagcgatagatagactgtttcacatctccaaccatgaatagattcccctgcgcttcactagggttcgttacaaggcgtagaatagtttcttgcaccatattggtatcttgatactcatcgattaatacttctttaaattgtttttgataattttgagcaacttctgaagctttatcatcatttaataaaatttttaatgctaaatgttctaaatcgttaaagtctaatacccctctttgttgtttttcttcaaagaaatttgcagaaaattttttgaccaattcactcaaagtttgaatatctggtttcattttttctaagtcagataagcaatttacttcttccctcgaaaaccagtcagttgcgatatttttcatttcttttttagctgcatctcgaaatttcttcgcttcctccacatatacttcatcgtaatcacttttatttttaagtgtcggaatacgcttgaaatctatgttttcaatagatgttttcagatgggtccaactgctccagttcaactctgacaatgcttgaatttggactaaatcattttctaatgtagctaaataaggtgctggcccgttattttcatttgcataatttattgcgtttagtaaatagtttttagcttgatttactcttaattcaatatcttctttaataattggaaaataaggtaactctgtaatcgaagtaatctcttctgtattataaaagttcaccattgcttctaaccaagcgtttggatctgggttggcccttgagaaatcatatagcttagatattaatgagtgcaattctgcatccgaacgatctcctgtaaaagattctaccaaatgaaaaaaagcttcattattttcaataccatattcttgttccagcaaaccttctaaaacctcatcgcgaatcatactactttcaattggctcaattaagcgaaaacttggatcaatatctgcctcaaaatagtattttcgaataatttctaaacaaaaagaatggagagttgaaatagaagcatagttaagtaatgctacttgtctttttagatgtgctgaatctggattttgtcccagagcttcttccagtccttttcctattctaaacttcatttcagcagccgaagcattcgtaaaagttacaattagtaactcgtctacatttaagtttgctgactcatctattaacttttcaatgattctagtgactaggacagctgttttcccagaaccagcagcagcagcaacaagtacattattgcctttagcttgaatggctttccattggtcgtctgtccataatgactcttctggttttggcggtatatttaaactcatgctactgcgtccctccttcaatatccatttttgttaaaattgtttctgctttttcattagctaaatgtctatattgattacttgttaaagatggatcaaatccgcaaaatgaacggaaactgcaaaattgacaaggcgttctttcttttagtttatatggattaattgaaactgctccatcaagtattttattcccagcttcttgatatttatgacggacaaattgtcgcattttatcaaattctgctcttgtcgcagttcttgatctcgcactcaactctccattttgttttatttctgccggaataatagtagatgcttttcctttttcaagggtcatatccattaatgaaacagccacgggatcggataaaatcaatcccttcattttggagcttttttgtaattcttttgcgatagcctcatcacttaactctttctctgcttgtacatattgattgtgcatatggaaatacagcaccccagctggttcggcagttttgccaatcattttttgtgcatttgttactacaatatccaggtaggtaagcatttgaagcgctaaaccataatagacttctgtgagcgccaaatcatgcgaacttgatttataatctataatgcgtaggaacgttcgatcatcttgttctgccatatcaattctatcaattcgcccctgcaaaagaagttcgctatctgattgaagaggtatttttaatggcggaatatctcctttcaaaccaaaatcaacttctaacccaacaggacgaaacgcactgctttttgcttgttcatttaaaacagttgttgccctcgttatgatttggagtaatttatactgaatatattccattcttttagagctaagcaaaatttcatgctggattttaggagctaggaatgtcattgcaagtttcgccatttgcttacattcttcttctgttaaattaccccaatccagattatttctttttaattctgctgagatccattccattgctccatggaaaatctctcccatatcaacggcttgcaactgaaaatgccctcgctcttctaatttcaagccatattgagcataatgttggaactcacaactgaaaaatttctccattcttgaaacacttgcatgaatagtttctccaaataagtttttagcagttgtttcttgtaatggttttgttttattttcataatatagactcgatagcacttgcttagccattattgattctttttcattttcaaaataactattgtaggcatcccaccatacactagacagcgtgtaacctcgtttatacatttgtaattgacttgtcaacaatcctaatgttgcttgcttagagcgaatgtaactactttgttcagcatcacttaataagctcgggtctgttaaataaactgattcatttagttcattaaactgtccttttattttccttaaataattggattcgcttaatacttttccttcttcatcagcggcaggataactaagaaataatttgtcactagggagacttattattttatatgctaataagtcttcttcaccaatattatttttagcagatggtttcaatttactgtcttcagcacgcaatgcatctctatcctgatccgaaaaaatccctttatccttttgacgtagcggcataacaccgtcattcatcccaatagcaaaaatcactttcatatctagcaatttcgcattctccatatcagataaaactacttggtctaaggaaggtggcaaaagcgaaaattcaagtgcatcaagacccgttccaataatttcagtaaaactgtctagatctaacgtttcctctcctaaaacttctacaaattcatccaaaagtgcggaaatggagctccatgcttgttcatgttctcgtgcaagttctaaatagccttgctcttctgctctttgtctccatgactccaatcgttctacagcatttacttgctccaaataatgataaagagctaaagcaaactccatccctgtttttgccttccttagatttaattctaaagtagaaagtggattcactataagattcctcatctcattaatgatagattgcatatgaatctcctcatctgtttgaggcaatacattggtggatagtccgcggattttccggtaaatccaatctccttctttttcccatttccatttattttgaataccattttctaatacatagttttcaagaatatctgctttacgtctgttaaggcttgatttttcggtaatatcaaagaaaaactctgtcttaactgcttgaaagattggttcgtacttccagttaaatagaatagcatctaagctagaacgaataaactcgataaaagggtgtttagccatagctctctttttatcaataaaggtaggaatgttatatgcttccatcaccgtttcacataaaacgtcataatctccaagatttcttgtcaaaatagctatgtcgcggtatctatatccatttaatgcttgttgacgaatctcacgagcaatcccttctatttctgcacgtctgttattcgcttgatggatttttaaattttgaggttcgtttttgaaagacataaatttgttatgcccccaagtattagctaaaaaggctagtgattctgtttttgctcgcttattctctaagaagaacttgttttcctcgacttgagtgccatttaatttagccaactctaatagagcataatacgcttctgtacttgctttgaacatactgtattcatctagtccatgctgaatttcaggaacattaagcgtcaaagaaatcgttactttatcacatttccgcattaattctccaatgactgtcagctcttgttttgagaaagaagtaaaaccatcaatgactatttcagtctgatttaaataatcactatcggcaattttttctgcaagcaatctcaaatagtcttcattttcaaggaatttatccgctaataattcctcatacttttgatagattagcgagatatcatgcactttattattcacacttgtagacagattcgtagcgctcttgaccatgtcttcaatggaaacctcttcttgtttcatttctttaaataaattcgctaactctgaataaaaaccctttctagaagtagctcttgaaaagatttttaatttatctttttgatcaagggctgcttttctgataaccatttctatacctgtctgacttaagaaagttttagataatccacctgtttcttgaagaattttccacgctaaacggctaaaactaaatatttgtgtcccaagcatacctgctaaattttccttatttaaaaagcttgtctccatctgaaacgtcatttgatctgggacaataaagatatacgttttagaattttgtttaattttctctccaacctcatccattaaatgagttgttttgcctgtgcctgatctacctgcaattatttgaagtgtcatatcctcaccaccgaacatatgtttttatttagtttaccatatttgagcaatctgtccagaatttttttcgaggcattttttgtttgaaaatttataaaacagctcaaaaaaactaagatagctcttactatcttagtttttcatatattctactcaaaagctagcatttcctgttgaattttattcattttttctgtaagtttcataaattccgctttgttcctattatcgagagctttatcaatttcagctctaagttgttctaattttctctcttctaggagcatcgtcaggaagcattcgataaaaacgtttgttaattctttttcacccttaaggacacccacctgattcatcaacgaattagaaaaatcacgcatttccacgactaccactccttcactcatatttattacaatcttaaaaaattgtaatatgccaagaaaaaacagaaaacagcttgaaaatacaactttactaatatctaatgacttgcaaattaccatgtgctataatgacaaaaaataactcataactaactttgatgcttagtcgttacttagaagttttgcttattaggcaataactctaggtttcttcttagacataaatacaaacatagaggagttgaatgaaatgaaaaaagaacaaatcagtactcagttttatgaagtaaacccgcacacaatgattatttttccaaaaaaatctggaagtatagtctattcagaaatttatgaagttgattctcattatacttctaaatttaccccgtttgagctaattaaaaccagctgtaactttttcggatcaagctatgagggaagaagaataaacgagataccaaaaaagaacatcctctcaaaaggatgtctttatttttactattatatagaagaaacattatttatgtgactaattattaacaatagattgatgttgtaaatactcgtcatagatactctttaaatccatttcattcttttttatacgcctttgcaaggcttttaactttcttgtttcatataattcggcaaacagcttttctatagctttatcttttccttctacgtagcagatgtatctaaaatcattaaagctatataatctcacgtcataacctcgcaaaaaataatatcttctatattaatgtcaattattcgctcgtcaaagcgttcaagtgatacaatgtgttttttgttgtcaatgtatacaggaactacatacttatagcgtacatgatgattgttctttaaaaacagtacttctattgaccaatttctttttaacgcatctgctaatactattgaatgttctaaaatatcatcaattaaattatacatttccgtcacctcttgtacacattatacgaacaaacgttcttgaaatcaagcggtaaataggattaaaataaaataatgtttgactttgtataatacatgtattataatataagtatagaaaggagttgagacagtgaaggatgttttagaggaaataaaaacagtcctcgaaattatcactcttgcagtagcgctgataacattacgcaagaaagataaaaacaaggacaagtaaattcagaggggtggaattcccctccctctaataaattataacatgcctttcacaaattatgaataaatatatctggattatattaattgttattgctgtaaatgggttggctagttactttcagaacacagcattaactatcattgctatactgactacattagcttgtttagtgtatttaataaaaaataggaagtgattaattatgacgaaaaaaacgacctctgacgcgcagttgaaagcaaataaggcatggcaagataaaaacaaagaacatgcaaattatttaaaaagtcgttcagctgcgcgatcttttattaagaaaaaagccactttagaagacttggaagaactagaaattgcaataaagcaaagaaaaactgaaataatttcattagacaatagccctgaatgaaaaatttcggggtttttattttaaaataaatttaataaaactattgactactacgattattcgtagtataatatgtatatagtaaaggaacgggaggaaaatacaatgtataacaaggctgaaattatgaaacaagcttggaattggttcaacgatagcaacatttggttaagcgatatcgaatgggtaagttacacagacaaagaaaaatctttctccgtttgtttaaaagctgcttggtctaaagcgaaagaagaagttgaagaatctaaaaaagaaagcaaacatattgctaaaagcgaagagttgaaagcttggaactgggctgaaataaaactaggattacgttttaatatttcagatgatgaaaaatttactagtgtaaaagatgaaactaaaatgaatttcgatttaaatgtttgggcttgtgcaatgaaagcagttaaactacacaatgacttgtttccacaaacggcagcttaaaattatattatagaaaaggaatgtgattaaaatgacactaacaacagcgcaaaaaagatattatgacgcgatgaatgaatttgaagcaattaccagtaaagaattagaacaaacaccagaattttcgcaggatttacttaatgactctgactacttagctgttacaaaaaatgaagcgtatgcagtagcactttgcctgctcgatgatgacaagctatatttagatgaaactttagttcactcgacacgtttagatattgaagatgaaacttattatattaactttgtagtaactaatgaagatgattttaaactagctacagatgaagataaggaaaaacacgataaacaagaagtaattataaaaagtgggttgaactaaaaatatgtcgataaaactattagatgaattcttaaaaaaacacaataaaacgaggtatcagttaagcaaactgactggtatctcacaaaacactttaaaagaccagaacgaaaaaccgttaaataaatatactgtttcaatactacgctcgctatcgttgatttcgggtttatctgtatcagatgttttgtttgaattagaagacatagaaaaaaattctgacgatcttgcaggatttaaacacctgttagacaagtacaaactctcatttcctgcacaagaattcgaattatactgcttaatcaaagagtttgagtctgctaatattgaagtacttccttttacgttcaatagatttgaaaacgaagaacatgtaaatatagaaaaagatgtttgtaaagcgttagaaaatgctatcaccgtgttaaaagagaagaaaaatgagttactttgataagtttaaaaggaagtgacactagtgaacaatcatgttatagatttgacaaataagaaatttggaagattaacagttaaagagtttgttcgttctgaaaatgggaatgcggtttgggaatgtgtttgtgtatgcggcaatgaaaaagaagtattagctcaacatttaaaacgaggtcatgttcaatcttgcggttgtttagctaaagaaaatgggcgtgaatatgctgaaaaaaatttaaggacagaaacagcacagaaaaacgcccttaaaagaaaactagaagtagacgcagtcgatggcactatgaaatcagctttaactagaagactatcagcaagaaacaagagtgggataaaaggcgtgcgttgggatgagaaaagaaataaatgggaagcttctattacctttcaaaaaaaattacattttttaggcagatttgaaaagaaagatgatgccataaaagcacgtagagatgcggaagataaatactttaaaccgattttagataaaatgaattgatataacaattacgctaagcttatgtttagcgtgtttttttgcataaaaaaagccctaatgtttatataatagggctttatatcgtatccgatataattatatctacaatcttacctctttttgagagaatgtatggctctttggtagttttttttacatgtaatgtacaaagtctatatgtattattatttcgtgttttctgcgctcccaagacaatgcacttgtctcgatcttttcggtaaaaaactaaatctagtttcatataatccccttgattatcaatagggtttacctttacacatatttgtatgcttttgtggatgaaaacgtcatgtaaaaaataataacttttcaccctatctgatatcttttcataatctttatgtaccataatactatttaacgtaattttattatttctaatttctgtgaggattgcggttgcggtttttctttttactactttgttaatacctaataaatgaggcaaattatcatcatataatgagataactatttgccctattccttttgttgtaagaataatgcttttaccatgaaatttctcagtaaaatcgtttaatagtgttaataactcaaatctatattccgctgatgcttcatccactaagcactcatcccgtctgtataaaaataaagtgctccgtcataaaacggagcataataaaataagggatggattgggatgcgtctcccatcgggaccaacggtaagttataaacccacttcctggggcatatagcaccctgctactatacgtcgtgcgaacacgattaaatgaccctacgaaaagaatattaaatatgggaagacaaggcaagagacataaataaagcctatcttcctaattatcataaccaatcacacaaccaaagtaaataactttgcacaaagctaaacaaatagtgttacattcgacactataatacacaacatatagtttaataaaaaacgaatcagcttaagtacaaggagattgaacttccaaattctatatattgtgtttatgtcacacaatatgagttaattattgcttaaaaacacttctttgaaatgaatgtagcagtttaaaaagcccccgcgaaagcgagggctttaaactaaatctttttaacaaacttcgtgttagcagtgagatagtaaccagatttcgttttcaagcgaggtgtcccgcctttagttttccccatccctgaaatcgtgaagactgtgcctggcggatatgtgccaccggttttatgcttttcagtgaagtctactgaattgtatagatcacattgtactagtgttttaacttttcgcggattttttgtgtagtatgtgtttttgcttgctggtgtgtgtggttttcctgcttttaacttcgctaataatgttgtgttctgcgttgctgttccactgtaatttttaattccgtaacttgtcgctagttttttgcgattcgcaaagcttgaatctagtttgtttaaattcatataatctactaatcctagactgttcgtgttcgcatttgcgctcggtttagaagaattactagtactagctccttttccaaaagtatcagttccataacctttaaaattaaattgaaggtgcggattgtctacaaatccagaccaatcaccaccccactcaaaacctaaagattttgcctttgccacaaatttcttgcctttgtctgaacgataagcaccccaatcgaccgttttacctttcgccatgacgaaatctagcgcttgtcctactaaatgataagagcgcattgtttgagacgctccgctagcaacatttgcggcttgttgttctttcgttctaattgtttcgtagattaacacttcaatcccgttgctttcagaccaatctagcaattttctagctgccgctttcgtattgtctgctaacttatttacatttgccaaacttctactataataataacttgtcattatttatcatcctctccatattttttgcttcgattagtaaattgttcaaataatccagtaccgccagctcctgctaatgcgcctgcccaaatcatcgttgcaagcgatccagagccgtccaaaaacgttgctaatgcgcccagaatagcaccaataagtatgctaacagtcggaagccacttaggcgggactaactccgttttcttaatcgcctgaacaaaaacaggtgttacaactactaaaaatgtcatgtaaactagtaactcttttccaaactccatttctatcatcctttacttcgtaattttgtgttctagcaaatctaccttatgcgctaacttaccaacggattttgacaggctgtcaattgattgttgttgctgtttcatcatgtcattttgcctatccatcaatcgctgttgttcgttcatcgtacttataaatttatctctctcttctttcgattccttattacgcttctctcgttcttcctccactttttcgcgttcttctttcatttctattcttacaatttttgaatcatcccaaattctttttgtgataattagtaagattataaaaagcgctacaaagagcgccgcgaaaaacatttctttcgctaaagcataatcaaaaacttttgttagcccatcatacattttcatcatcccccataaaaaaaataagcctattcggcttctatttcttctgactgtatttgttgttgttcttgttttaactcatccacttttgcttttacctgacctcgcaaattcgcaggaacttcttcaatagtttttcgattattcatcactaaattcacataaattggtatcatataagccatgtcatcaccctaaattactttcaaatagtgcggctaaagcctcttgggtgagtagtaattcctctcttaatttttctatttcagttttttctgctggtatgattggattttctgattcccatcttttcttgtcttctttccaaatacttccatcccagcttggataatacattgctcttgctatgccgttttcgattattgaaggttcaatatttgtagaatttttcggttgattgattaaacctttttcatcttcaaacacaagtattgtttcgagataatcgccattttcatcatatgtgtaaaactgtttatagttcatgtttactcctcctagttcccgacttcatagctaataccagaaagacttatatagctaggattagcattatccgttgatgatacttgtaacatttttccgtcaacgggaatagcaatacgtcctccgttaccattgtttgatgcgacagcaaaatattcagtgaccacggttcttgttcccgctggcattgtcccaaccgtactatttgcggtactggaaaacgttccagctatagcacctctaaattcagcaaaagttttcaaaccggtagaagtttgttttgctacaagtcgatattgaggtgtattactgtcaccagttgagtaaccagcggcaaggggtacatttatccacgctccgtaactatccatcttgctatctgtatatgcttttgcagagtttaatgcactatccgcttttgcttgtgatcccgcggtattttcttttgtattccaattcgttttatcagtcatcgtcacatgaatgtttgtgttgtttatatgattttcaaaatctgctttttggggaaattggtctggattaagactatcgaatgtgttttttaattcagtagcttgtccttgcaaatcatcaatttcattttgaagaatttccactttttcgttaaatattttctcgtaatcatcccatttttcaacataataggtagcaacgggcaaaaaattatcatcaatcatcgctttttcaataacaaaactaaaacgattgatttgcattgtttgatttggatatttaacgtacaattctgcattagcttgtccgtcgtgacttatttgctcatcagtcaatgagtattcaaaaacgcctcctgttctgttaattatttctggattaacaatgtagctactttcgtattttttgccaacagacaataccatagcaagcgttacctctgccgcgcttgaaagtggtaaattgttatcatctttttttgcagtaaactttaatcgcgcagtccctcctgagtcttgcgtactaaaccttatctgaggaacattagctttagcgttctgtgcactaacagaaaaatcaagaatagctgatttaaagatttgatttgtcattagaatatctgacctcccgcttgtttcaattctgcggtagtagcgtttaaaactggcgtaccagacttaaccaaaatgcctccgctagcagcttttaagccgacattcgaagttgcttcgcatgtatttgttgatgcaaataaagcatgtcccatgtactcggacgacataataatgttttgatttttaaaatagttgctataacagttacctcgagattgattgtattgcacagttgtaatattagttgctttcaaattagtgtcaaatcggcatttagtaactgtgccgtaccagcaccttgcaaactgaattaccgtagaattattattcactgccgtactcatagaattaagtccttgtaccacgcactgaaacatgatgccagaaaacagaatacttttaacaaaaaaacctgtttgtccagttgtcgggtcgattgttgctaaatttgtaggctggatataaaagcattctgcgccgctgaacgactgtactactacatcttcgttatattgccccggctcacaaaagatataaataaagcctcctacttttactttcggaaccatatttacagctttttgaatcgtcttgaatggtgcatcaatagctcctgttcctgttacatcatttccgtttgttgaactaacataatactcaatatttgatgcagaattaccgtacaattcatctagtttactttttaatactttattttcttcgtttactgtttgaagtagcgcatttgattcagctaaatcacttgcaattgctgaatagtcaccatttagccgcgagtttaaagtgctgtagacttgaccgtttttgctagttctagcatctactacttcagtaatattatttccgccagcttctaaaacaacattatcaattctgttattagttgcatttatatctacatcttttgctaatgaatctttttctaatttttccatattagcattaaactgctgatacttattagaatcaaaaagtgtatttccccatttatcaagatttaacatctatttcgctcctttcaatacttttgctaattgggccattattgatactatcgactttttattatttgaaagtgtaatttctggcgcttttattgtgaatgggtattttttatatgcaactatctgcacatcataatcaatgccaagcggttcataaataaatagaacataatcacctttttcacactcataatcattcttcaatatcacgcttcccgttgttgctggatagtcttgtaattcaagctttaagcgcctttgcatgttacctgcaacagtatatcgttcatctgaaacgggttcttgccaacgaatgccccatttttctacttccgggctagtgtatgtgattggggaaaaatagttatttccgttactatcaacttttccatatcctttaatcttcgtttttaacgaaagagtatcaatatcaaaacttgcttcgtctgtattgtatttatatctgataaaattttccgtcttagcaccataaatttcacgtggtttaaatactaagtgtcggttatctggaataacgactactccataatcatccaataattgatcaataagtgttaagtagttgttatttccaaagttttcttgttgaactttttctagtatattggaagggtctattatctcccatgaaaagcctctgttatcagttttaaagatatgagttaagcattgttctaaagtaaaagaacctgttatagcgtcgtcttgccgtccatcctgacatgtataataaatgtgaggcgctctaatatccttcgatagcgtttttccaacggcgtcatgacttaattgttttacaacaaactcttgacctctaaaataaacagagctttcataatctaaaaaagagtagcagtgagcgtttttgggagtttgcgctaccttaaactcaatgctccacatctcgttttctgtccaactttcgcaaaaactatctttatcgaaatctgttaatatttcttcgttattcttccaaaaatcagcaactataatatcactattcatatattcacctacttgtacaaaaaggagaaatcccacttcgtatctaaatgactagtattgctaatctcgataagattctctccttttttcaaacttattaacccgtgattcgtgttacgaccgcagggatttccgtttattctaggtgtagcgcaatcaataattaatgtgtctgttgtacttaacgatggataatagataaatctatcgcctgtcgtaatattattaattgttaattctccttcattctgaccacgcaaagtaattgctaaataatgttcgcgcgggtctatgtcaaaactaccgccattataaatgatgaaacgacttttagtgtgagtatatctataatcctccattgctagaccttgcccgaactgccatttatcgcaatcaatttcagaatcgctaagcgtagaacttagcgattctgaataacctcgaaacacatcgaattcaagtgtcaaatctgcgtatcccggcgctttgcggtcaataccaacgccactcggatgtactctatattttttgccaggcgttttagaatgaactaaaaagtattcttttctctgataaataagttccaataactcatctagtttaacgtgatataagtctgctgattctgttctaaaatggcacaaaatcgagataggaaacatgctaaagttactatctgtcgttctagcgccgtcagaaccagcgaattcagtataattattaactatttgcggcggttctctgctcacttctcctacctctaaatcgaataattcattaagcatatatgttttaccttcaattactaatgccagcgatgtagccatgttatagcccctttccgtaaaatgctagtgatgtagaacttcctaagtgattgtttgtattatctgcaatatcttttccatcgacattaaaaataataggtctatcgccagattgctgaatggctttgattaaatcagcgttgcttgactcttttgtcttgttgtcaataatcgtcttaactgtaatagttctgtttaaatcaacgctttttaggcccagcgctttttcggctgaaattttcggcagattaatagtcggaacggtcatattagaagcggcgtttactactttatcaaccattttgttagttgattgaacagcgcctttagcgccagctaagactccatttccaaggcctcccgtgaagaattttccgagttcgatggccacacgtgaaggagaatgaattttaagcgcctttttcactgaattagtgattgtgttagcaatgctcttagctgctttttcaagttgttttttctgactgtttagtccgtttattaaaccttttgctgcgttaataccagcagaatacattgcattagccgctgtatttcccatcgccttagatgctgaattgatttgattctgcgtgctgttaatcgctttgatagtcttagcgtcagacttagcaagagcttgcgcataagatgaaccattctctactcccgattccaaaatgtcgtttataatgtctttgctaacaccttttttacgcaatttttcaacatttgcttgaaaagctttaatttcttttaagcgtttctgcatttctgcttggattgattttggattttctgggtctacattgctaatagatccataactttgcattttttcagtaattgaagctgcatactctttactctgcttcgtcaagtccgccattttagtattagcagcttttaattgagcgactactttatcacgtttcttagctgtcgctgctaatctgtttgtttgttgaacaatgtaaccttcaatactattcagggccttagcttgtttgagttggccactgctcttattcttagaatgcaatcccgcgtcaatcgctgaggatattttgtctttcagcgtactagacagcttcttgatttgcgattcagttcctagcgcgcttgctacaagattatttgccgctttcgtcactgctttatttttgtctgcgatacctagagaataaccagttccgaagtctccacctagttttttcgactctttcgaaggtgaatgcgagtcttgttttttctgaactgccgctagtgctttatttgccaaagaagcagccgctctaccaaccgcgcccataccactcaaaatgccgtttacgtatccagaagcaaaatcagaaccaactccactagaatcaaccgaaccagcaccagatttagcagaattccccacgcttgacccagctgaataagcgccgccttttcctcccataactccattgttaaagcctgcgctgtcttttgaaccaactgctttgaatgcgttcgggtctgtcgcgccttcttttgctttatttttaactgctgaaccagctgatttagcagcgccttccttaccttttacaccgtccgcaaagttctgtccgccagtttgaccttttgttttcatttccgagtcaatagagtcagtgcccatttttacgccatcaactaaatatttgccagctccctgaaagtcaccagatttgatagctgttaaaaattgatttttcccactttctccattcaaaaacataccgtttggcaagctagaaatagtacttagaacatcattattaatatttaaagctgctgtagtataatcaccgctttgaagcgctgtgacaaaagcttgtactccttctccgccacgctgacccattatgccagctaatcctgctaacgtattatcaattgatgtgcttgtagaaacaaagttttgccataaagcggataactgttcatcactaatatttccaagctgagacaaaccgtttgcgaatgtttgtgcgtttaaagttccgccattcgcaataattgagttcatttcagatgcccaatttttaaggttagtagacaatgtttgatttttctttgtttgttcgtcgatttggatttgatagttcgctttttcggtttcagttgaagcgtccgcttttttctttttcaaatcagcaagcgatttctcgccagtttcaacagcttttttcttttcttcatataagctcttttgaacttctaagctcgtatttctttccttttcatttaagcttttaccttgttctagtcgtagtaaatttgcttcaacatatagctgattttgtttcgctaattctgtttgaatatcagtagtttgttgttgtaaaaacttcttctgctgagctgttaactcttgcccatcggcccaacgatttgtttttagcatatttgaataatcactttgcaaagttagtaatgtgctattattctttgttgtttcgtctactaaagtcttatttgcatctgctatagcttttttacgcttatctccttctaggctttgcgccttttccatagcagcagtataagcatcttgtgactttttagctgattcttgatactgactgtatagctctttagcagaattcaagaacgacttagttttctcgctaagtttattgccgtactgatctactccaccgcttaacatcgtatctattgcttgatttgacttcgaaactgttgtttctgtttgcttagcagtagattcaactagttttaatgtgtcttttatttttttacctgatgtttctgttttcttcgctgttttttcggcttctccacccatttgtttgaaggcttcaacagtaccagttaatgcataattatctttattaaaagcatctttaatagctgagccagcatcgacaaaggcatctttggactgttctaagcttttcttagcaccttttaaatcaccttgtagcacttgaaatgccgctttaatagcatagtaaagtccctgtaacgctttaatagctactaacactattcgtgctagcacttgaataacatcaactacagcagctaaagcaaaaccaagtacaacccacgccctcacgccgatatatttcaatatgcctttaaacccgcttccgacgggttttagggctgatactatttgtttgaaaacatctattatcttgccgaatgagtttttcaccgcttcccacatgccagatagaaagctttttatccccgccgtgttttccttaaaagcggtatacattccatagataacagctattactgcgccaaccgccgcaacaacaacgccaaaagcagcagttgttgagccgagtgttcctactaatttaacgaatgaccctttaattgtattagctacaactgaaagtagtgacccgctagacgtcaaactttttatcgctcctgctagtttagctacttttgaaaatacgctactaataatattaaaagctacaaatcctgcggcaacttttgccaatagtggtgcccactcaatcaaaacaggtataaactcttttattttctgaattaaatcagaaagttttttctggaattctgggcttgctgttactgccgcaaactgtttgaatgcgtttttagcaacgtctaacgcctgaattatcggaccttttaggttttctacgatattcgcaagactcttaacagctgccgttttcatgttcgcaaatgaaccgctgatagtgttacctgctgtttttgctagacctgccattttagccgtgttcccagccattcctgttgttccttcttcgataccttttgttagcattgcaatagctctagttgattctaatgatccctcggaaacatatttcttcatttctccaacagatttaccagtcgaattcgctaaaatttgccaagcaggaacacccgcgtcaactaagcggttaatatcgtctgcataagcaacaccagacgcttgtaatgctgagatagcatctgtcatctggtcaattgattctgaaccatttccgacaccataggcagcgtcagcaatagcggtgaatacaggttttacattcgccgctttcatgcctgccgcaaccatttttttagcgcctaaagcgacggcatcgagcgcaattggtgtaccatcgatagccgctgtaaggtctgtcataactagttgcgcatcttttgctgaaccagtaaggactgttaacgatttagttgcagtatcaatcgtatcaactcgaccaatagcgctacccacaacatttttagttgctgcaattaatccgaacgctgctgctaatctgagaatactaaagcgagcttgttcggcgggcttttcaactgaatttttaagcgcttcacgcattccggcgcctgcacctttcgccgccgctttcgctgcgttaaatccgcttactaatccacttttaattaacgaaccagtgctttttgcaatattccctaggccttttaatgctgaaataccagcttggccagccgctttagctccggatttcacagcgctaaagcctgtttttaatgctgatttcactgttgttcctgtcgttttcgccgcgcttgctacagcgctaaaagctgttttcattgcgctacttactgctaacgctgctgattttgtagcactaggaatagctttcacagcgctaatagttccttttacgctcatataagcagcaactaccaccgctttgtaagctactacgaaactgtttttcactgctgtagccgctgttttagcagctcctggaatacttttaataacttttacagtagtttgagcaaaagaaatagcagccgatttagctgcttgtaaactacttactaatgcggatttaatactgattccagcgcttttaattgcgccggggatggatttaatgacattaattgatattttaacagctgacacaatactactttgtactgtcttagcaattgaaaagaagccgtttttgatattaactgctgtgtttttgatactcgttccaagatttttaaccgctgtaatagatgctttagcagcgtttacgaatccagtttttacagtggatgcaagtttagatagtgccgcttgtacattagaaggtaactcacgtataaagtttaaactagcttttaaagcatttgagcctgcgtttcccatgcttttaaacgcattaacaaatgtgtcttttaatcgttttgattgactagcaatatcagacactgcttctctgtatgctttatctaatgccgccccagcgtttgttcctgcttttgccaaatctttttcaaacgcatcaagttgtttatctgcttttttatcgtctaaactaatctcaattactactgatccatcgctcatgttctcacctctaatcttttaacttatatctgtttttcagtttaattaattcgtttcgttctttttctgttcctttcccagaaggtaattccgcttgcctaatgccgattatcgttttaattgttgtatcatcacgcaaactttctaacaatgctctaaacttataccagtgcattttccctcgactatctaataaatcaatattgtagtcttgtaaaaaagaagcgtagatataatccgcatcttgcgttaacgaatatgaagcaatttcttccgcatcgtcattgttgtttgtagcgcttggcatcttgtttccgtcgatatcataaagcagaccatcatcattttctttaacaatataattagtgaaaatatcaataagtaccagtgatttttcttcaatattcgcgtattcgtcttcctcatttgaacgtggccaaggcatatcatcagcaaaaagcacatcaattgcgaggttagctctgaacacatcagacaaactattatcttccgttaaatcaatcactcttagaacgttgtcaaaagctaaatcgagcttatattctttcccttcgtattcgtaaatatcattaactccaaaagcgagcgaaagcatttaaatcacttcgctttttttgtcatttttgctttatatttcttttgaatttcattttgttgtttttctactgaaccaacgatactttctgcaacttgatcgtatacttgatacatttttaaaatatctttgcattgcttgtaacatttagagaatgcttcttcgtcgtctaataaaactgcatacgcttcagttaaagcttctttaacatcttcttctaaagcaaaataatcttctgaactcatttcgtctgtattatcaatgttgtatttatttaacttttccagtttcttcttgtacttctcatctgcttcaatccatttgcggcgcatttcatcacctaaaccgactctaaacagttccgtgccaagttgaaactcttgatatgattcttctaattgaatattgattacattattttgtgccatgtatgatttcctccaatttaaaagcccctactataaacgtaagggcttcatttattaatctgctgcttctactgttacttgtactactttgttgatagaagtactttctttagatgcaactgttatgtttgctgttccttctgctacgccttcacctgtacccacgctattgatttttgccttcggtggattagatgaagtgtaagttacttcttgactagctcccactggcaatacagaagcattaatagtaaatgtttctcctactttaacggtaattgtattgtggtccacttcgacgctggacgggctctcctcagggttttgtaaccgtaggtgtttcatcataagcgatgcggcaaccaaacgctgggaattctgtagcatcgccgccacccgcggagcctttaatttccgaaacagtcgctttaccgatagctgtttcggtatctggaatttcgattttaaacataatcccgcgattttctggcgttctacgtttagcgacaattaagttttgtgcatcatcttcacgatcgtgtgtcccttcaaatgtgtaagcttctgagtaacctagcacaaccgttttttcgttgccatcaccgtcatagtcgccttgctcttccgtgttgtccgaaccatcgtcagacacgtttgtaatccatttggatagtcgtttccaatccggttcacctgcaccagtaacaatttcagcaacagaatatttcgtttttgcgtttttaattctcatctttatttttcctcactttcaatatataatttgattttgaaactagcgctataaataaacgttccatcgtcactagcagaaacgaggttcggcacactagttgtttctttgtcttctagcacaaagctgttatttaagctctgaatgctttctaattctgtgttatcaaaataagcagtaatagcattcaacacatttaaaactttcatttcttgcttgctagagccgtttaggttaaaagaaaaagaccgctcataagagccgtcttgataaccttgtttatcgttatttggagtcagcagcaaagcgattgactcgggttttaatatcgctgttcttaatttcatatcttttaaatcgacgttgttttcgatagcatccatgacactgtccaaaaaatctaatgacattataatccctcctcaaccgctttttgcgctacttctatccaactttctagcttatctacttttgcacgttggtcccatttaggaccagctaacggatgatgtgtgagtgtgaaattgaagtttattccgttgtagagtctccgcgcataaatagatgtccacattatttctttgtcgttcataataacgtattgatttgataaatcaccctccaaaaaggggacataaggtgcaatatcagcggccgcttgattaattaaagcaaactgacctctttctttcgccttttttacgctcccttttgcttttgagaggtccacacgtactttaatcggcatcaaaccacctcgatttcccaatgatacacgctattagaagtcgcatagcaaggtataactttaacaatcttataagcttttccagagaaaaaaattctcgatctacttataaaatcgtttggcatgttcatgctgttcaccgcatcaataaaaataaccgcatcatatctatcactatcagacaatcccgcgatttgatttgattttgagaaatcaacacgaacatgttcaatctcaatgcctttttcataaacgacttgattatgtctatcttcttctttgtacgcttcatagctaatgttatgaattagccagtcaagaggtaacggaggggcatttgttatcggttttgctactttcattagcgaacacctaccccgctataaagcaagcctgtgggagctaaatacgtcctcacgtcgcttccaatcagcccgctattgagtgatgttgcagttgatgcaaagttactatcactaatagaagttcttccgatgctcacattatccggcttagatacagctagctcacttgttccgcccgcctctttgaaatactcgatttggttgcaagtagctaactgtatttgatgctgaataaattcactgaatgactcaattccgctttttcgaattcgataaaatgtcactgaatcgatttttctttcagcgtgttttaacaatttgtcaaattcatcctgttccaaatgctccccagcgtattcattagtataaaattccagtgttgtgtaaggcataatattcgcccccttttatcaagccccgccagctggcaattcttcaactaaatgttgaataccaacaataccgatttgtttatcttcgtaaactttttcccagtttccagctttcgctaagtctgcattcgtcggagtgatttcgttagcatcacgaacagcatttttaaatttaactccatatggatgcatggtgaaagcacgtcgagtaaatacttggtcattacctttggatgcatcacgagccgtttcgaaagttgttaacttagctgggttacctgtgtttcttccgatagaaccagttgcgaataaatacgatgtatatacttttgctgcgcctgttcctgtggaaggtactccatcatctacaactacacggtatcctaaataagtcgggatattaacttctccccgagcatttgggataaatgcaattaagttttgtttttgcaatgctgtatacactgctgaatgcataaccattaagtttaaacgatctgcagaatccccgagtaattgttttgcatctaataccaaattccccgaaattgcagatgttggttttgatagcaagtgagagctcgctaatgcaccgtttttagcaaatagtccatttaacacggaaattagtacagtttgctcacgacgcatccaccaagaagcgattttccccattaaagcattcaaagggtcgtctcccgagatgaccgccgcaagttcattgactgaccagccacgaccacgatacattacagctgcaatgtcagcgctagccgtgattttccctgtttctagtcctttttcaccgtcacctaaagtttcgtcttcaccatctaaatcgttccaaaacggcatattaacaagtaatccgcccgctgtgatattttgtgcaacgcttgggtcagcaactgcaattcctgattggataattgctgatttttcagatgtgaagttatccatgtacgcattaaaaacctctggtgttacaacgtctaataattttgtgatttcatttcccattattcactctctcctttttccgttaaaaattttgttaaattaaatgaatctgattttaaattttcttttaatgaaccgtcgtaaccagctggcgccttcggattaccactaaatccgaattttggaaccttttcactttcttgagcaaataaataagcatcgctttcctgcaatgctcccagctgttcatcaaggcctttcagaccttcgtctgttagttctagtttgtcgttatctaaaagcgcttttaccgcctttggatttctcgcttttgcaccagcaagcgctagctcaatagctgaatttttctttgtttcggcaatttcagactggtaatcagactctaaatctttgtttttttgctgtaagtcctcgatttgttttttcaattcttcgccagtaccagaattctttttcaaatcgtcaatatccttgtcccgttgtgtcagctgactttttaagccgtctctctctgcttccacctcagataattgttgcttagcagctgtaacatctttaccattttcagccatcactttattaatgacttcatcctccaagcccaaaccttttagatattctctttgcattttcgttcctccttcgatatttttacgcggcaacgaccgcgagagccgtctttttacgacttccgaacaggtcgaatattaggcatatacttgttctctgctgtattgccttgttaatttatgtgtgtttacaaatgctcttagcttgctttgtttcgttctaacagcctgtttcgcttttttaactgccagttcatcgccgagctcttcggcagctgataatttgcgtttagacgctcttatgtctcgttccattaaacgttgttgctgactcaacatgtaaacgcgtttgttttcttcttcgtctattaactcactatcttctggcgctacgttaatgccctcaacgaacgggaaacgatgatgacggcaattacagccgaaaacaccatcgccgtatccatatctgagttccggtgaataaatagacatgtatttattgccgtatttcgtttttgtttcttcaacagataacaaacagataactttaccttgaacaagtgaacatgttggacgtgcgcctacatgttgcgaaatacgcactaaatcaacatcatattcattcattcgctcatcttcaacgctgttataaacactgttaaccgttgtccttgtaacagtccggacgtaagcttcaggtgtccaccttttatttgccttgtctacaagtgcaggaacaccattttcagcgaatttagttactgtttcagctaatgcttgtctatgtgtttttaaaccagccagaacgctctgtgtggtttcgtgaatgatatctgaatagatttgtcttgcttgcgataacatcgtttgattgacgcgattatagttactttctgctaacttaaaataacttctcattactttatcgactatcgtttgcccgtcacccacgagcggcaacacagcacccgcttcagctaatttgctgaaatagttatctacttgttttaaatcgctgtatcccgcatctttgacaatagaaaaaagcttcttagctgatacaccggaagctttggaaattttatttagcatttgctgatctaatgcgtgaacttgattaagtttttctatttgccaagccagcacattgtcagcactgatatttttctttgttttcaatcgccgaacaataagagtgaacaattcattttctaaacctgtataaacatcaacgaccggctgcacaaataagtcgagttgccgcggagtcagtgccatctaatccacttcctttttagaggtcttttccttctctgtaataacaaacccattccctgcatcagctaagatttttctcgctttttcttcgtcaaacggaaacgctgcaacgatcatttcaagtgcggaattataaggaagttctcctttagcaaccgattgaactatattaactaatgaagttatttgagcgccgtttaatgacacctcttgaatagtttcgcctgcgacagcactagcttctaatgtcccgttcgcattttcatctggcagctcgatatcgcctaacaatccagataaatcatttcccggaatttctgcttgtacatctttttctatctcttctttccacgcttctgcttctgcatcggtaatattccaagcacgctgtaaagcaatttttagcggtatcataccttggtttttagcagtagtataacgattgattgttgtatcttcatcttgtgctatagaatcgtcaaaatcgactgtaatagtatctagctctactacttcgccgctataagcttcaataaatttcccgacctcgagaatgctcacaatcatttcttttatgccttgttcgattagttgcgaatgactgtttttagtttgataagtttctgacttctcgcttacgacctctgtagctgtttttaagccgttttcatcgaaagtgaatgtgccagcgcttaacccaacctgcatcgcataaatgcgtagcattgcgtttatagactcgataaactcagttgagcgaatctctacagatatatcttttactgatttaccgtccgcatcctggtcaccttgatataggaaaaatgcttcatcggttgaatcgaaatactgtgtggttgagccgtctaatccaatggctgttttaacgaaacttgaaggcactaacactttctttttacccaatttaaattcttgatagaatgaatcaaacatcaagtcaagcgtttttaatgtgtctaatgcgttagcataaacggaaatgcctaaaggtgaagttaagttcttgttattcgcaatgttaggtttgatataaataaatgttggacgtgtaaacttcggcaatggtacaactggctcaatatcattaaacaacaattttaagcttacttttccaccaagttcgtccgggtcgtcagattgatatagctctgttgtgactgtgtatatatcgtcttgccattcattccattcgagcaacgtataatatttatcgtttttatgaaaactattagcgataacacattcgtctacgttctcactgtcatttgatagaggatacatgcaatcagctgtcgcgaatgaaactttgacgttcttttttccgtcgtgatacacttttatcacaaaaccgcccatcgcttcgccgtattcgatgtaacgctccatgttcttcgtaaaaccgtttgttttcaatacattaagcacgaattcctcagcggctttatcatcaatattgattttcactttctcattaaaaagaagcttagacatgtatttagccgtaaccttcggcaaattcatagataattgacgtctgttaaccggattgccattgtgttcgtaatttagattatgccattcagcgtaatggccttggtacaatcgtttccacatgtcaatatacttataatcttcatcattagcatttacttttttatggtcttttacatctttcagtgctttcaatagtcccattctccgcatcactcctttcacgcttgcgattatttggttaatcaaggtttcccccccctagtatttgagccctaacttccttagattgtcttttacatagtactgaaaagcatcacacgtatgatcgtcttctttgatgacttcaggcttatctgtattaactgttttgacatcccattgatatttccggtgttcctcgatgaatatttgattttctggaatatcaagataataaaaacgaccttgcgcgagtaaatcacacacaaagtcaatcatatccacttttttaccttttgcgacggggtgtaagctaacgccgtaatctttataatattgattgcgaagccctccctctgcgctatctactgtttgcatatcaacatttgtattgtagtttccaactactttagtcataaaatctcgcaactcctttgaatactcgctaggtgcttttttaacaacttgattagcaggactataatagtatgtgttaagcaaaataacatttctttttgcagtgagaccaaaacttagatatgttgtagctgacacttgatgccccgtatcgatagcaaagtcaattaaaataagcctgtcatccgcaggaatagctttaagcggctgaaacaggttcatgttataaacattatcaccaaggcctattacctcgcctagatacatccagcggtagtagtcaaggtcattctttttgtatttctcaatcttcttaatgatttgcttagataaaaatcctttttcatcatccaaataagtagtgtgatgtattaaataatcatcgtcacttcgcttactatctacatattcattcacccattcatatggattgcgcggcgggttaaatgacatgtatattgtaacttcttgcccatccggcaaatcttcacgaatgaacgtatcttctacgacatcaatgtcagtcacaccggaaaattccgccaattcctcaaaccacaaatcgctaacataacccaccggaattttcatcgattttagtttagcgggatcatcacaaccagaaaaataaaaacccgttccccattctttatggatgatttccattggtgacttaccaaacttaaattggtcagcaacgcccatttcatacaaagcccatttgatttgctgatacactgatttatagagcgtattagctactttacgaagacacaccatgttagattgtggattagccattttcttttctacgagctttaaactgataacagacgacttcatagaagaacgtccgcccttagctatgatgtgattatgtttagatagccacaagtcataaaaagcaggattaatcatatctgttacattgataacctggtaatcaattagttgtttgtgtatcgtcgcgttcatcggtgccacctgcctttttatcaaggtaggcttgcatttcgtcaacatttgacatgataattgttgcaaagccagaatccttacaatcttttttggcttctaattcaagcttattaatctgtgcatcaagaagagctacacgcctatcctgcatgtcttttgtttctttatagcccgatctatcgaataagtcttgaagtatttgcgctcttaaagatagtatttctttccaatctttatgccacaataaatcccgcttcgatgtactgttctcttcataaatttcacttacactatcctcaagctcttctagttgaatttttagttcgtcatattcttccaataactcttttttaaattttccttcatcagctttccttccatccatttttttaattttggattcagttcgccttattttcgcctttaaattattaatatcagctatcgcagttattttacgagcatcggtaatacttaacttgcgagatgcttcttcatgcttcgccattttatcgtcaatcattctaacctgtttccataattcagcatatattttcgaagcgtcatcctgcatacgttttgaaagtagtttcatttcttcatctataagttccagcaccttaacattccttaacaacctagaagcttgttgctctgctgtcttagtactgtaacctgctgatatggcagcttctttaccgttaaacccattcattacataggttttagcaaagattttatatttctcttccgttttcactacatatcaccacactcccttattttgataaaataaaaaggaccatcacaggccctttatttttcttaactcaagtttctctttatgtttaaatatttttgatgttgaatctataaattgtatttcgattgcaaaattaaatctcttgccatctgcatattttttaatttgtttaacaataaattcataatcaaacattattggttcgccggataaattaggtttaataatttgccaattcgctttattctccaactgttttaaaagagcttctatgtttgataattttttgggttctgctctaaataataatctatccatcaaacttggcactaataatatttgtctaaaattaatttccaagctaaatttactattatttacaggagtaattataaaaactttcggttttccatcacttataattataccgttctttttgctaacaaatgaatgtctaaataatatggttagcctttttctattttcgttactatttaattttatagcccaaaacaatgctcctactgtcgctaacccacttacccagtcagctaaactcccaacctctagtataaaactcatttgcaacacccttttatttttcactataccaaataaaaaccacctgctcaattttcaacagatggaaagggctatatatttaaaaaactggttaacgcaccagtcagcgccacatgcgtgttttacatccagtatggataggatatgagattgaacagaagtgtcgtcatctgttgagactagtgcccagatacaaagcctctgccgggcaacatagcaatctcctgctatatcatcataagattataaatgagaagtggagcgcagactcaatataagattttatttttgtaatcatcttcacttctcactaataacattttatcacctttttttgctcaaaaagtgccagaaaagtgccattttcaatttagcacttcaatcccaagtgttgttgctaattcaataacagccttccttttctctcttttgtattgcctttcttcgtaaggaatatcaagcataatagttatatcttgtaagttatgaatgaacttctcaaacagtatctttctatgaatgtgctcaagctgattcaaaatagcatcgtattttttaaccgcttcttgtgctgcatgaacgttatcgacattatgaattgcagcatcttctacttttgaatgaaattcattactgaaattcggtggcgttaatttgtatgttgtcgtcattgttggcaatttacgacttcctgccattacacgcagcattaaatagtctttaaagaactttcttactgctctgactgtctgaatgtagttaatatcttcaacttgtggtagattgaatagttgtcccataaagtcgcccccatcactttataaattttcgataaactcccttattttctcaaccttttcagctgtatcaataaaagattcttcactaattgcttcaaattcaatattataattagcgatttctacgtcctttccgtcacaaattgtttctcttgtaaatacatttaacttttcaatttgcattttcatcctcctaaaacatatttccccaaatccataaaatccctttaaccgctaatcctagtacaaaaatcagcactaggacccacagagtgtaaatagtaacagctccaataaatttcgctactttatcaatcattccaaatctccttatttttttgatattcgttcatgtcaaaaatctgatagtattcttttttgtttctttgtgtgtaattgaaaactacagccttcgacactttgaaatgctcagcaattgcgtaacatgttagccctgcgttacgtaaatcagcgaattcacgaattgtaatttccgcccattttttctttttcacgatgcgatcgaacgttttggtccagtaagttttttgcttttctattgtattctcgttcattagttgattgagttctttttgcaactttagtaattcgtctagttctacatcgttatttgctatataactaataatttcccgctgcctcgctttactcttcgttatctccattactgtcatttgtcacacctccacgaaatttcgacctttcagtttcaaacacttaattgattgcatataacgcagttcgaaaagtttttgtttgattcgaaactcttttgttaacattcctttgatgtcgattaattcctcatgtccatcactgtaacgaacgagaaaatcagctttatatttaatcgctcgatatagcttcccgtttttccgaaagctttcttgtagcacaaactctggctgtaaatcgaaactcactacttccccgctcatttttaatagtttcaattgctgataataagctgcttctgctttgctatcgaactttatattgtcaataacaacttttttcgcattatatttacttcgcgtactcgttcgcctcgttaatgacgaacgcggtatactttgcctcaatctcttcgtcccccatactttcgatttcgctaatttggtagtttgtgacttctgcaatcgcattagccatttgtctgatgctcattgatctatttctcaacttttttattgctgtgtctgctgtcatttttattcaccctttccctcaaaatggcaaatcatcttcattaatatcaatcggcttaccttcacttgcaaatgaatcgctcttctgactcgtatccgctcgatatgagcttgtttgattgttatttgaataattagccttgttttggtaattattcgatgtagcaccttctacgttgttatttttaggttctaagaattgaactgattcagcaactacctcagtaacgaaaacacgtttaccgtcgttatcctcataattacgagtttgaacacgtccatcaacgcccgccatgcttcctttcttcaagaaattagcaacgttttctgctggtttgcgccaaacaacacaattaatgaaatctgcttctcgttctccgttttgattagtgaatgtacgatttactgctaatgtaaaagtcgcgactgctacgcctgctggagtgtaacgtaaatccggatcttttgttaatcgtcctacaagtactacacgattcatcattcgtcttccctctctttcatcaattcgcaatcaagcaaattttcatcttcaattaattttatatgtgcatctggtcgatacatgggattgaactctgctattcgtatcgcctcttcctcgttctcagcttcaacttcgtacacttcttgagataaatatgtgattttatacttcattccgccacctctttcaaacattttaatattttaagtagtaacactcttacagatcgttttaaacgccttgactgaaaggaatatgtttcatgttgtcggtacttcattcctccgcctctttccgaagtacgtattgtacaagcccacccatctgctcaatattatctcccacataagtagctgtcaggattttccatccgtcatcaagaagcttaataagttcttctcctttatctgcaagaaaacctacctgaactattttatgtttcattccgccacctcttcaaaacttctaatatcaatttcttccaccatttcaatcttaaaacacgctggcaaataatctcgttgtttagcccattcatatatcaaatctgataattgttctttatgttcttgagttacgtcattcaaatattcctccccgcactctccaacttcgtcataaacgcattgagctatattttcaagcaaagtatctacttctgtaggaaattcgacttcttctatttgaccaacgaaaaatgtataaatgttttcataatccaaaggtcgcatatttaatccatcagataaatcataatctctgcgttcatcatcatctaaactattgtattcagttaataactcaactccataaattattgcttcttcttttgtgtcaaatcgttcaaaagcaccccatctttcaccatctgtaccatttaacatccattgtccgtgtttcattccgccacctctttcaaaataaaatcaatcactctgtaatatctctttctaagcttttcgttatctccatgcgtttgttcaacagacgctttaagttcatctaatgttccttggaaacaacctgttatccatatgtctaattctttgatatatgctatttgattgtttttacgtgtcgtatctacttgtacgcagattactgtcaagccttctacatgttgccagtttacccaatttaaatttacattacttaaatttgcataacttaaatctgcattacttaaatttgcaaatcttaaatttgcataacttaaatctgcaccccttaaatctgcaagtcttaaatttgcaaatcttaaatttgtgttttttaagtctgcattacttaaatccgctctatcgccaccttcgttgaacagccatttcccatgattctctaatatgatgtctaactcttcttgtttcattccgttccctccaataattccggattttcgtgtatgttgccgataacttccatatgctttactaacgaactgccattttggttcaacacataactaggctcgcccttgtatgttgttttaaaacatgctccgtcataaacgatggatgtaaaacagaatgttggctcaacatctcccgcaaatgaatctgtgtatttattgatatttgaaaatgccgttacaacatccccttcgaaaatcttcttgccgtttttgtcttttaaacctgtgtattgcataagcacgacatcatcaaagctgtaccagtcgacgcacagcgtacatttcgcattaccacaaccgctcacacctacagcttctgtttcgttaaagcacaaatccgtaacaggaagcattttcttttttctttttacaaacgctctaaatccaatcgctctcatgcttcaccctccgcttcctcaaaagaaaagaagttaataggttctaactccgcaattttgtacaattttccactctctttatatctccaagcatgtttttttaacatttctaagtctttaaacactgctagagttcctttactacgatgtttagcaacctgtaaatcctcgtcaactattgcatataattccatatttacgcctccgcttcctcaacaagaacagcaaactgccaatatatttcgcctccaggtatgcctttaatttccgcttctgttaatttggttctccattccttattttcattgataattgatccagtaatagatgtttcatcagattgtacatttaacaaaacatacatattaatcacttctaattcggctgcgtcatcgttccatgttgaaagcggcaaccttacataataaagcggttctttctcgacttcgtagccgtcaagccaagcgcgggcgagtagttcttgattatcagctgatgaaattaaccattcgtacatttcagcagacatatcagaatcttcatagtctaacaaacaagctaaatcgtattctctttgtttacagtgttttatccaatccgcggcaaaccgaggaacggctatcaattccggctcttttaccttaacgacatcctctaatttccggaaaaaccaacttaaatctgaaactttcaggtctacccaaccaacatcgttgttaacacgttttattgtgccaatgataagttcattattttctataaattgcactttatcgccttctttaaatctcatgctttttcctccttaaaaaggtttaattgcattggtggctcaaaattacaccaaataatttcttgcctatcagatttcttttctgatgttattcctacttttgtcatcgttttaagcactggccagtctgataactcctgtttatatagctctgattcgtaaccgcttaacattactttgccatcatgatttttaagcacttttagtaactctttgtgttgctctaaactaaagtcatgctgataatgtgaacttgctaaagaagttgcaacatatggcgggtcacaatatatcagtgtatctttatcgttatgctgttcaatcagtttaattgcatctacattttcgatttgagcgtctttcagtcttgctgcagctattccgatgcggttatacatgtcattccactcatatgcgttgtaaggaccattccaagacacgttttttctaaatccaacatttgcattagtcttgcctccgacggcaaaccagagtctcacggccattcgtctggcatcctctaatgaatcgcttgttatttcttgagaaagcatatactcttcacgagaatacagcgtgtgcatgattaaatactgcagtttttctggattatcacgcattgctttaaaaagattaactagtcgaccgtctaaatcgtttatcgtctctaaagtagctttttgcttgttcataaagactgcacatgatccgcagaatggttctaaataacttttatgctccggcatattttcaattattaaatctgccaaaccccatttactgccgggataattaagtattcgtttcacgcctgcacctcattcctagccgctaactgcgctttaatttcagcgacttgtttttctaagtcttcgcttgatcctgttgttgaagtttcttgttttgtttgtttctggtctttgtcgaaccagtccggcaatacttcttctttaactggtttgttatatttgttgtaagtgggcttgttatatttttgctctaactctatctgtcgttgtttttccgctgcatcaacatcagctattgttttaaatcctctgctttcccagtttttaagaatcttattaacgtaagcgtaattacgtttgttagctccttgctctgatgtaacttccaaagccttcatgacaatttctcgattacctgcaaaatcatctacccaagcaagtaatttttctagttcaactggaagcatcattccgaatccgttttgttcccaaaaatccttgaaatttaaatcgctgttgttgttgttaatatctttatctaattctttatctatatctattgcgttactttgcgtaacagtaacgctacttgtaacgttacactctttatttcctttactgtcaccactcgctattctgttctgccgcatagcttctcgatgtttttccactcttttccttgtttgctcacgaaccctttccataccatcaacgttttgatgtttttcccaattttctatttcaatcaatccattttctgttttttgaatcattccgaagctctgtaacgtatgtaacgttacacgtataatcccaacatcacggttgaaaagggtcgcgagcatgtcttccgtatacggtacattttcgtttaaataaatgcgtcctttgtcgttagtttttccagctaaagctagaagcctaatccatacaataagcatttggttaccctctggcattttttcgagcaacttaatcttttcatcatcaaacatattgacggataactttatccattgaatccccgacatactcgctcctcctgttttaattaacttgtttttgcgcctctatttctgcatctagttttttaattagtgcagaagcttcacctttactcattgattttgtgtccgtaattttatagctttctagtacaaacgtgccatcatgcccgaacggttcacctataacgctcgctttcgcaaatattgccttcctttgtgccggtgatgctaaattatcattttgttgtgattgttttgtttgttgctgactattactattttgattgtaattattagatttataactgttattctttgggtatttgctaggggaactttgaatatttccatctttatcttcatcagacacaatcccaaaaacagctgctataacataacgttttgcatatgtgatggtcccaccagcttcttgcgcgctactcattttcttattggtaattactgtcatgtatagtggatcgtattcaatccattcaccagattcatgcattaacattgttccaatacctatcgttccgttatcaccactaatgggccattgtgtaaaggagactccatgaccaggagcaactttaaatattgcttccacaatcttatcgagtggtgtatatttgctatctgtaaaaggattagccgcagatttttctaacggctttacttctttttgaatagccgccatggctttcgctatagccccaatactttcagattttttcattctaattacctcaccctcaatgattcggtttgtactaatttagcgcccggtacgtctcttccttcttttagagcgcttgtaatagctttcttatctaattttttaggttgctctactaaaaacatgaatagtttttcttcgtcctctaaacgcaagctaggagggttcttctgaatgctaatagtaaatagtgagcttttaattttacggatatccacttttaacatttcgctctctaaatactctttcatgtttttagcttttgcatctaacgctgttttacgcttcgttaacctctctacttccttagctaatccctcagcctcagcatcaatgctttttaccatttttataatattctctgccttttcttctatcggctctctaatgctatctaaagtgtcttgtagcgtttctgtgtctaattcctccgccatttctaaaacttgattgtatgcttgagtcaattcgtataatttcatgcttgcacgccttctctctgctcaatttttttagctagtttttcatgtatatcaattaattcatcaaatagtttagatccttctaagttagttgattgcttctttagtaagttataaagcggtgttaattcatcgtcataatcatgtatcacgactttaaagccataatgaatcgttttaaaattatccatgttatccctccattgattaaatttcggatttaaggtataatttctttaaggtaatatctcaaatcccggacccacactgctatgtgggtctttttttattcctcattttccgcctcgtcctcattagtacgctctaattcctctaaatattcgttatgccaaatttggcttattctttcaaaactggaccaacaagcatcaacaaccatcggattctcaaccatgttttttatcacttcctctcagccagtagcctgcgattacagacataaacgacacgaaaatcattactgcaaaaacatccattatcttgtgacctcctcataaccctttagtttcagttcttcgatatagtccgtcattttctcgcaacctgtttcaattaaagctatcttttgtctgaaagccgggttagctatcattttcgttctgtcgtctatgaaaatctcgctatttccaaaaatcgtttgcttacgaaaaattcgctctgccattgttgtagcctcctaaattaaaattagaattaaaatcaaattacataagtttattaacgctaatgcagccgctattatgactaagatgctgaataatatttgacctttcatagtgtgcgcctcggtataataatttcgcgtagatgtccatctacaagctcttttgtgacttcatactttttattaaatgtttcagctctttttttgcgctcaacttcatcaatctttttaaatcgctcttttacaatgttgtttatttctgtgaaattaatactcttcgactcgtaaccttcgtaactagccgatactaaaacttcgctcattttccgcaactccttactaatccagatttttgataatatagatcgcgtttgtttaaaacttgttgtaaatctatgttgaaagctatcgcaatacttgcattcagagttaaagcagatgcaactacatctgttatttctgaaatagcttgtttagctgcttctcgttgtaacatgtcaccttttcttaaattgaacgtcatcgtctctaagccgttttttagcgtgttcatcgcttcttcaacttctagttcaaatctgttagttaaagaagcgtgatggttgtctaaaccgtcaaaaagcggtggtatcattccgttgctgaattcatgtgcaaacaagtaagtacttcgcggttcgttgtaactatcaattagctgttctgcttgctctagtgaaacagtacgttttccttttatctgattacttattaacgctggcgttacataactatctatcgctagctctttttgcgtgcgagtttctgctaaaacttgcatcgcggctgttgctgatgttgatttttgaaacataatatctcaatcctttttgtttattttttagcgactaattaacaacttatcgttatatactattgttagtcgctccccagtgactaagttgtctgtataagcgtcgttgtggtaggcggcgcttaaattatgacttgattgtgttcttctaataacttgtttaatagatatacttgtccttttcctgttacttgtggagtataagtggttttcattaagccgtttctatctgtatgaatatgtgttttttgttcaaacaatcctaagttcatcgccttttgcgacggtttgttgtaataagcacctttacttagcaaataaccgcttcctctcagccattcaaaaagcctgttttgtcctatatctaatcctttttgttttagaatagtagctaaatcttttactaaaattgtgttctcactcgtttgcacagcttccgcaaaaactactttcggcttttgttcctcaagtttttttaacacctcttgcttttcttgttgttcctctatccattttttagctctagcgactggatcttctatcatgtatgaaaatgcgggatattcagttgctaatttcctcgcttgtttttctacttcaatgaagtattttctaattgctcgacccatttcgttgttttgcaccattgctaattctttagcagtatctaaagtcaaaaaataatttgttgatggtcgcccattggttttactcaaagttgagtaaaagtctaaaccattctcataaccataatttccaatcattctatatatccaatcattaaatcttgtatttactaaaagcttttcatgaagcatccgggcatcaacaaatttttcgccttgttcattttctaaaactggcaacatttcatttgcaattacttgtaaatttgacattttgttctcctttctgttcgccctttcacagtgctatagtttttgtgaagggaggtgggtaaaatgggagttaaaattaaatttgattcaaaaaaattagagagacaaattaaagaacaaagcctaaaaatcgcaaagcaagatattattaaaaatggaacggaagggagctgtcccgaatgttcgcatgtatttacagttaaacctggagtaaacacatgtcccgattgcgggaatgaatttactgtaaaaatcaagtaaatcacttcaccttaatttctaacgagtttatagtgctagccaagtcttccaccaaagatttggcttcaattaatctcttttctaacaaagtggcgttttctatggaatcctctactccattcagctctactttcatttcgataatttttagctcttgatctttttcaagtaaacttaaaatattttttataacgctgtatttaacgaatgagccgctctctatcgcattaccattttctaaaattgtttctagtttaataattgcttgtttgatgttattcatttttcttcctcctaaattatgatttttagtattttccagaccatattagtctttgcatttcttcgctgatcgtgaatgggtgatattccacttgtacaactggtaatgatcctgcttttaaatctaacttgaccgctgtaattccttttcttaattgttttccattgatttctaatactccataacaacagtttctatctccttgcatcttaatatttaatgattttaagttttctggtggtatgtctttggttttaaaaacacaatctttctgttcacttcttttgttgctcagatatcttctgttcattttctagcctcctattttcttttgcctaaatcgccgttagttttttccgataatctattaactaatgaattaatttctgaataaagttccggcaaaatacttaaatcactaaaatcttctccggttatacttaattcaatggtgagtactgactcttttctatttctcttagttaggaaagagtttgtaaatgcaattttcctcattttctagcctcctgtttttcatttaaataaaaatgactcttttcgcgtactttatcatcaaaaaaaatagtccattcgaaatctaaaactgatgcaatacgcatagcatttacaacagaaggatttcttctcccttgttcgattgatgcgtaagttgttctttccacatccgctaattctgctacatcttgttgagttaggccattttcttctcttatttttttcaaccaaatcctcataaatatctcctttctctaattgtgtcgtattgcgtacttttatattactacgctttttgacacatgtcaataaattaatactctttttgacacattttatttaatgccaacaaactacgcttaatgtgtagtataattttatgagaggtgatagcatgtttggagacatattaatgaaattacgtaaaaacaaaaatctaacccaaagcgatatagccaagattcttggtgtagcaagaacaacctattcttcatatgaacaaaacagaagaatgcctgacgcggaaatacaaattaaaatagctgactatttcgatgtctccttagattatttgcatggaagaggtaaaaataatattgccgacacgatcgcagctcacattgattcaaatgcatcagaagaagatataaaagagatactcgcttatatagaagaaaaaagaaaagaacatgtaaatgaagaagaaataaatattactgatgcggcttcaaaaggtgataaagaggtaaatgaatttgttgacgaaaatgaggattttaaagcagttgcagcacgcataatgagcgacgcggaagcagtaaaagctgttaaatcattcattgaattttacgagcaacaaaaaaacaactagtttaataatatatttattcttgaactacttgacttgtaatttatttacttgttattactattgattattaacattctgtgaaaacgtgatatttcttataaaaattatgtataatataagtgcaacgttgcaataaaaaaacaacggggtataaatacatgaaaactttagatgaactgaacgtaaaacatgatatagtgatactagaacacgaatttacttcttgttcattcactttaaaaaaagaaattttcatagttattgatagtagattaagtcgaagcgaaaaattggaagacatcgcaaggcttttgaataaaatataactatgtaaccagttcgcggccgcgggttggtacatataaaagggagaaagcgggatgagcaagtatagttacctactaaaaaaatggtggttttggattcttttattattaattatattaagtttgtttaatggtatatgggttcttttatttttcgctactctagcgactttgacatttgctataataaaagttattaaaaatgaaaatcgtcgaaaatatacgttaatcattatagcgacaacagtcttgcttcttactttttctttaataagaacagttcaactttataattatattgtggagaacccagaggaaaatgtaacaatagataaccaaaaaaaagatactaaagaagatgccgaaacagatgaagtagaagaaacagaagaaacggatcaagcagacgcttctgcggcatatacagtcacccaagaaggtatagagtcttttaatgaatccattaatcgattaatttctgaatcaaatggaatacttataaaagttgttccattcgaaaatgaatatgatatgttaattgcatatgtaactcaagacttaaaatatcaagatgaaacaatcaaacaaaaaaatgctgattatttagggaatgaaatacaacaacgcgctcttggtactctttttgggggagatagcaatcataggcccatggttgagctaagatatgaagacgagacaaagatggctggaagtagtgcttttgataaaactaatatgaagctcacaggaaaataaaatataaagggagaatgaatatgaaaaaagggatagctttattagcgggatttatgttagcttttagtatttttttaacaggatgtggcggaacagataatacaagaaaagaaaatcattctgatggcagtgccgaagtgaaaaataaaaaagataataatacatcagatgaatatgtagaagatggtcttttattgaaagtgggagaatggactaaagataaagattacgatactaaagtgactcttgaaaagattgcaactccaaaaataaaagtaggtttaggcgacttaaatatgttaattaaggatgtaaaaatctttaaacgagagaatgtcagtgacgcagaaaaagaggaatttagcggtggaaaagtccctgtcacagatccttactacacaatacaagttaaatatgatttagaaaacactggaaaaaatgtgctaaattttaatggaattgattatatcatcacagaccaaaaacaacaaattgatgttatgactgacaacattggtataaatggcgtcttcactgtacaaccagatgtcatagttgaagatgaatatgttatttgtatattaaaaaaagacaacgtggataaaataaataaagtaactataaaaacatcaccagtctataacagtgaaacgtatgacgaaattactaaatcgatgactatcaatattgaatttaaataaaagagagcctcagggcttttctttttaccgaaaaaagaacgtatgtgcgaaaggagaacggaaatgaaggcagctatttatatacgcgtatctactcaagaacaaatagagaattactctatacaagctcaaactgaaaagctaacagccttgtgccgctcgaaggactgggacgtatacgatattttcattgacggcggatacagcggttcaaacatgaatcgccctgcgctaaatgaaatgctaagtaaattacatgaaattgatgctgtagtcgtatatcgattagacagactatcccgctcacaaagagatacgataacgcttattgaagaatacttcttaaaaaacaatgtagaatttgttagtctgtctgaaacgcttgatactagttcacccttcggtcgtgcaatgattggtatattgtccgtattcgctcaattagagcgcgaaactatacgagatcgaatggtgatggggaaaattaagcgtattgaagcaggtcttcctttaacgaccgcaaaaggtagaacgttcggctatgatgttatagatactaaattgtatattaatgaagaagaagcaaaacaattacaaatgatttatgatatttttgaggaagaaaaaagcattacatctttacagaaacgactaaaaaaattagggttcaaagtcaaatcatatagtagttacaataattggctaactaatgatttatactgtggttatgtatcttatgcggataaagtgcatacaaaaggtgttcatgagcctattatttcagaggaacaattttatagagttcaagaaatattttcgcgcatgggtaaaaatccaaatatgaatagagattcagcatccttgctaaataatttggtagtgtgtagtaaatgcggattagggtttgttcatcggagaaaagatactgtttcccgcggaaagaaatatcattatagatattatagttgcaagacttacaaacatactcatgaactagaaaaatgtggaaataaaatttggagagctgacaaactcgaggaattaattattgatcgcgtgaataactatagtttcgcttctaggaatgtagataaagaagacgaattagataacttaaatgaaaaacttaaaacagaacacacaaaaaagaagcggctgtttgatttatatatcagtggttcttacgaagtttcagaacttgatgctatgatggctgatatcgatgctcaaattaattattatgaagcacaaatagaagctaacgaagaattgaagaaaaataaaaagatacaagaaaatttagctgatttagcaacagttgattttgactctttagagttccgagaaaagcaactttatttaaaatcactaattaataaaatttatattgacggtgaacaagttactattgaatggctctagtagcttgtttatttagattgtttagttcctcgtttcctctcgttggacgcaaagagggaactaaacacttaattggtgttacccataagccacccattatcattgacccagtcacttctacttatgtatttccaactgtagcaccaagttcaacagaatgcatttggattttcccacaacatattaaagattatcatgcaattggatttaaccacactttaataacattttctaatatggaaacctttgagattgatatgtctttagcatcttttaataatcagattgccagaacctccatgttacatatgaaattttctcaaaaaatgcgtattatggagagtaatttcccttcaatgaataggtttttcccaccaaccactcttgctgctgaacctagacgttattacagcaccatgcttccaaataacgaagaacctaatgatcctcaagatcccgagcaataaatttaaaactaaataaaagccagctacgtaatagtagctggcttttccttaaaatcattttttattctcaatcgcatctgcaattcgttttaacattaataactcatcctctgagtatgtataaggtagttctaaataccatttctcgagttcaggatttccaattaaaggaaaggcgtttaccgaattcttttctcgcaaaccagctacatcatctaataagaaatcggttgttgttccaagaatttctgctaatttagccaaaataaaaattggcggtcggtggttatcattttcatacttgcttattgtggatgcagttgtcccgattttcgccgccagttgtttttgtgttaacctatttttctttcgtaaatgaattaatttttctccaaattccaatacgcccacctcacttcacttccagtatagcaatttttcggaaagaattcgagaaattactaaaaagaaatcgccttttaagtttcaaaagacgatttccgtattttatacagttggtttcttacgtagaacaccaattaatcctgcgctgattaatgttccaataataattgcaataatatagaaccacggttgggatacaaggaagataacaaaaactcctccgtgaggtgctaatactttaatgtttaagaacattactattgcacctgtgatggcacttccggcaataaaactcggaatcattcgaagtggatctgcggctgcaaatggtatagctccttcagtaatgaatgaagcacccaaaatagagttagttaagcctgcatcacgttcttgagctgtaaatttatttctaaaaataagagttgctacaaatgttgctagtggtggtaccataccagcagccattgttgctgccatgattgcactaccgcctgttgctacactagctgcgagtgtacccgttgcaaatatataagcagctttattaattggtccacctaaatccgctgccatcattgcacctaacagtaatcctaaaataactgcgttcgttccgcttaaactattcaagaagtcattcaaccaagtgttcaatgcgctcattggtacatttaatagcaacattaaaagtccgacaattaacaccgataaaactggatagaataaaactactttgataccgtctaatgtttttggtaactttttaagtgctagtttaattaattctactgcataacctgcaaggaaaccaccaacaagtgctccaaggaagcctgcaccaccaacagatgctactccacctgctacaaaacctgctacaagtcctggtctatccgatatactgtaggcaatatatccagcgaatactggaagcatgaagccgaatgcaacatcaccgatttgttttaatagtgctgggatttcgttatatgaaccaagttttgcgagttgatcttgaggaacacctaacatttgatcgagcataaacgcgatggcgatagcgatacctccaccaattacaaacggcaacatgtgagaaacaccgctcattaaatgtttataaatttgttgaccgatagaaagtccgtctgcgctctccgtagcttgactaccttcctctgctttataaattggagcattgcctgaaattgcttctttaattagctcttctggtttatgaattcccgctgcaaccggtttagcaattaaatgcttcccgtcaaaacgaggcatatctacttgtacatcagctgcaataataaccccatcagcttctgcaatttctttatctgttaaacggttttcaacgcctctagaaccatttgtctcaactttgattcgtacacctaatttattagcagtttcttgtaatttttctgcagccatataagtatgtgcaattcctgttggacatgctgtaactgctacgactgatttaccagtatcattggttgaggttggagcaacaactgtttcttctgagtcttcttgttcattgttgaataaattgattacttcctctggagttttagcatctcttaacgattgaacaaatgctggatgaaccaatagtctagaaagcgctgctaaagtttctaaatgagttgcattagcgccatctggggcagcaatcataaagaataagtgtgctggctgaccatctaaagcatcatagtccaatcccttctcactcttagcaaaaacaacagttggttcatttactgcttttgttttcgcgtgaggcattgcaattccttcacctacaccagtagaactctgtgcttcacggttcattatagcttttttaaatagcacctcatcattaattttcccgttgctctttaacgaagcaatcatttcatcgatagcagcttcttttgtcgttgcctgtaatgacataatcataacatctttgcttaataaatcagtgattctcattttagttcctccctgttattttggttatcttcacttgcggtaatagttcatctattagttctttttgggctaaatctgttgagaatgcagtggctccacctgttgcaactcctgcagcaaacgctttaacgggatctctcgttttatcaaaagtcccaacaaagcctgcaatcattgagtctccagcacctacggaatttttcagttccccttttaatgcatcggcgaagtaaacatcttctcctgtaaatagaagtgctccgtcacccgccatggatacgattacatgttgcgcgcctaattctaaacattttttcccgtatgggataagttcttctacgctaccaagtttcacgccaaataggtctgctagttcgtggtgatttggtttaattagaatcgggcgatttggtaatgcatctagcagttcttgaccagttgtatcaatcataaattcagcttttttttctttgcaaatctgaattattttattgtaaaaatcatttccaagtgaaggaggcacactaccagataaaataacaatatcgttagcagttactttatccatcactttcaaaaattcattaatttccttctcagaaatagctggccctagaccattgatttctgtttcttctccgtgctttagtttgatattaatacgagtgtcatctttcaccgttacaaagccagttttcacaccttcgttttgtagccaatctttgataaaactgcctgtaaatccacctaaaaaacctgtagcgagacttggtacattcaattgatttaaaactctgctgacattaattcctttgccaccaggcaatttataatcttgcttcatacgattaaggccgccaaggtttagttgatcgatttgtacaatataatcaattgatgggtttaaagtaattgtataaatcatttttctacctcgattattttagttttttggataaaggattcttttactgcagaaggaatatagtctgttacaatagttgcttcttctattgaaaacatttttgaaaaattaacttcattaaatttagtatggtcagctacaacaaaaacgcgatcagcacgttcttttgcagcacgttttacaaatgcttcttccatatcgggtgttgtatagccatgctccggatgcatcgcattagtaccaatgaaagctttatcgaaatggtaatttttaatattatctaaggcaactgcaccaataattgcttttgtatgcactttcattttgccacctaaaagataagcatcaatattttgacgaacaagctcttcaatatgggttaaaccatttgtcactactgtgatatttcgatttgctaaatgagtaattaattctaatgtggtggatcctgcatctaaatagatacaatcattttcttccactagacttgcacaatatgcagcaattacttttttactttgaatgtttttgaatgatttctcattcatacttggttcttggttgtgaagttttacaagtttcgccccgccgtgtacacgttggattaatccttgttcttctaattcgattaaatcgcggcgaatggttgactctgaggtagcaagaccttcaactagttcttgtaatttaattacaccaagtttctcaatactctccataataagttgtttacgctctgcatttaacattattactcctccatccaaagttagtttatcatctttttctttcaaaatcaaccgttttcattcaaaaacaatcacatgttttcaaatccattcatattataacatgtatatcgccataaaccttcataaatcttcatttatcatttttcttatacagttctaatttttagcagtatacttggttagaagataatttttttaggaggagttattcatgcaaacagaattaacatttgaacaattagaaaatttttctcgaaaatggcgtgaaaatccagataaattggtatttcaagctagtattatgaaaaatgggattaaagcagcaactgagaatcctacatcaaaagttagcattcaacctgtcttttcccacgaagttgctacagataaagtttctaatcaacaacaaagtggaagatgctggatgtttgcagcattaaatacgtttcgccataaattaaacggaacgcttggtttgaaggattttgagttatcacagaattatactaatttttgggacaaacttgagaaagcgaattactttttagagaatattattgaaacagcaagtgaggatgaggatagccgattagtttcgtggttgcttgatacaccacaacaagatggtggtcagtgggatatgttagtttcaattattgaaaaatatggagtggttccgaagtccgctatgcctgaaacatttcaaagtggcaagtctgctgatttaaaccatcttttaaatgaaagacttcgtacagatgcggttattttgagaaaagctttcacagaaaagaaagatactgcaggtttgaaagaagaaatgcttgctgagatttatcaacttttggttatgacgcttggcgagcctcctaaagtatttgattttgagtatcgaaataaagacaatgaatttaaacaagagttacaaattacacctaaagatttttatgaacgctatgtagatatggatttgaaaaattatattccacttattaatgcaccgaccaaagataaaccttttaatcaagctttcacagtggattatttaggaaatattgtgaatgggacgcctattaagtatttgaatgtggaaatggatgtattaaaaaaagccgccactgatcaaatcaaagacggggaaactgtttggtttggttgtgatgttggtcagctttcggaaaaaactactggtattatggataccgatattttcttgcttaatcagacctttggctttaaaacagcaatgacaaaagcagagcgtcttgattataaacacagtatgcttacacatgcgatggttttaactggagtgaatgttgctaatggagaagtaaatcgttggaaagtggaaaatagctggggagaaaaaattggaaataatgggtattttgttgctagtgatgcttggatggatgagtttacattccaagtagtggtgcataaaaaatatctatctaaggaattgattgaagcttttaatcaagaaccgattgcgttaaaaccatgggatccaatgggttcgctagcactttaaaacacaaattctgaaatgatttttattccgttcatttgaaaaagggctgctgctacgccggtaccatcttttatcttccccgagaaggtaccgtcgtaaatagcacagctaccacaagaagggcttttttccttcataattatttttgtaataccgagatcttgcattttggctaaagtaagtttcgctccgtatttatattcttctgtcacatctgttcctttgctatcaaccacttttgcatgacctagccagacatctttgccatcgccgcctattatttctgcagggtttcttggtgtgggcagtccaccagctacttcggggcaaaaaggaattgcttctccgttttccaccatttgttttattttggttatttctttatctttcccatcatatctacaggctattccagctagacaagcacttactgcaatcatttattttccctcctttattttttattttaacataaaaagctgccaccacttataggcgacagctcagtatttattagatgttttggtatgctacggcgatttgtgtaccgattaaagcattgtgttttacaagttcgatgtttgcttcaaggctcttaccatctgttagttcttttacttttccaagtaggaatggagtaacgtcttttccgtggatatggttttcttctgcttctttaagcgctgtttggattacatcgttaattactttttcgtccatagcgaattcttctgggattgggttagtaattactgcgccgccttcgatttgaaggtcccatttcgctttaagcgattctgcgataacttccggagtgtctgcacgcaatgttaattctacatcacttgaacgtgtgtaaaatgctggcaatacatcggtttggtaaccaataactggaaccccttttgtttctaggtattccattgttaagtttaggtctaggattgattttgctccggcacaaacgacagcaacatttgttttcgctaattcttctaagtcagctgaaacgtccattgttgtttcggcaccacggtgaacaccaccaattccgccagttacgaagattccaatttctgcgagttcagcacaaatcattgtagctgctacagttgttgctccaagttgttttgttgcaataaggtaaccgatatcacgacgagaaacttttgctacattgctacttttagcaaatagttctagttcttcatcagaaagaccgattttaatttttccgtcgattaaagcgattgttgctggtacggcaccgttatcacgaataatttgttccacatcacgcgccatttcaacattttgcgggtatggcataccgtgagagataatagtagattctagcgcaacaattgcttttccttctgcttttgcttgttttacttcttcggataatgatagataatttttcatttgaattcctccaggtctttttgtagttgggatgtcgataaattttggcgaacggtatactcagattccagtgttcgcgcagcatttacgcttcctgcttttaaaatttcttgcaatgtttttccttctaaccatgcgtagataaccgcggagcaaaatgcatctcctgctcctgtcacgtcgacaatatcttcaatcacaatcgctggttcaaaaatagtgccttctgctttgtttgctgctactgcgcctttgctaccatttgtaacgataacatttttcacgcctaggtctagccatttttgtgcagctaagcgccagtcctcatcgttttcaatcgtcatatctaggtgcgtttcagattcgtctcgattgcaaattagccaagtcacgtgatccaagcgttctggtaaatgagacatttttggcgaagatacgggaacgagtactaatggtattgaattgatttcggcaaagctgccaagatattctagtgtttctttcggacagtttaaatcagcaatgattgcgctcgcctgactcagcaagccttcattttttgcgagtacatctggagttaagtgatcatatgcatccatgtccgctagtgcaacgagtaaatctccattgttttcgagtactgctgtataagaaccagttgcgatgctcggaaatgctgtgacataatctaagttcatatatgtattactagcatttttgacagcttcccagtcggagtctgttccacaagcagtgagtaatataacttcttttccaaggcgtccgaggttttcgcctacgtttctagcaactccgccagcactttgtgttgagcgcactgggtttgatgtggctagttgggccttgtctttaatataaaacttccgatcgacgttcgctccacctatacaaacaatttgttttgcttcatttaaaatataggcttttcctaaaatgcgacccttcttaataaggccggaaataaggtttgcgactgtcggtcttgataaatcaagtatatcagcaagttcttgttgagaaatgtaaggatttttacggatggaattgaaaattatctcttccttttcgttcattttcgctttattattctccacgatataatgcacctccattccaaacttttgttttattttcaaacacatgtttattatatatgtaaatgctttcttttgcaaattaaaaaacgaaaatccgcttctttttaggaagaaaattttcgtttaggtttatttattttggaggatagctagttctgcttcggttaatgggcggtattcaccaagtgcaagtgactcatctaattgtaaattgcccatcgaaattcgttttaaatagctgacagattttccccgagcggcaaacattctttttacttggtggaatttgccttcttggatagttacttttatttcgtttggtgtaataatttctaagcgagccggtttgcaagtgtagccatcatcgagttcaattcccgctgcgaaagcttctacatcctcggccgtaacatcgccatcaattttagcatagtatgttttatctatatgctttttaggtgagagtaaattgtgcgcgagggtgccatcgttcgttataatcagcaaaccttctgtatctttgtctaacctgccaactgggaacggatccgtaagcgtgtcttcttgagcgagcaaatcgatgacggtttctgacacattatcctcggttgcgctcacaacattttgtggtttgtggagcatgaaatagacgaattcttggtaaacgactggggttccgtggacggttatttgatctttgtcgggatttacttgggttttactatctttctggattgtgccattgacgacaactgcccctgatttaagcagtggtttcacttcttttcgactcccgaaacctgtatgggacaataatttatctaagcgcatggtttagctccttttttcttttattgtaacaaaaaaacgaagcttcctcaaaggcgctccgttttctttctattatttagtttcgacggcttgtttattttgaggtattgttaaaccgagattacctcttagtgttgtcgctgggtattcgtttcggtacaagccgcgactttgtaaaagtggaataacttgttcgacgaaagtttcaaatgttccgggaatgtcggatgcgataataaagccatctgcggcctcattttggaaccaaacttcgattaaatcggctacttgttcttttgttccgatgaaaggcgtttttggtgttgctgcttcggtcgcgacttggcgaagggtcaaatgacgctctttagcttcttttttgattcgatccgttgtgctttgaaaagcatttttgccaatatctccaaggtctgggaatggagcatctaaatcaaattgacttaaatcatagtcgtcgaagtaacgtgctaggtaagttaccgcattttcgattggaattaggctagcaaattcagtatatttggcttctgcttcttccaacgtatccgctacaattgggctaattcctgggaaaattcggacttcatctgcatttctaccagctttttcagcgcgggattttacatctcgatagaattcaacagcttcttccaacgaatctgaatgagtaaaaatggcttctgcattttgagcagcgaaatcccgtcctgtactagatgcgccggcttggaaaacgactggctcgccttgtttggagcgcccgatatttaacggcccctcgacttgaaaatactcgccttgatgatttaagtgatgtaatttttcggggttaaagaattcaccggtttctttattataagtgaacgcatcctcttcccaagaattccagagtccgcgaaccacttttaaatgttctgccgcaatagtgtaacgatcgctgtgggttgggagatttttcttgctatgatttcgcgcggcaccttcttgcggagaagtgactagattccaacccgctcggccgctactaatgtgatcaagggaagatagctgtcttgcaagtgtaaatggttctgtaaaagaggtcgagaaagttccgacaagtccgatgttttccgtagactcagctaatgccgataaaatcgtaattggttcaaaacgattaagaaaatgcggaatcgatttttcggaaataaaaaggccgtctgcaataaatacaaaactaaataacccttgttcggcaattttggcgcgcgtcttataaaaatctaaatccgtacttgctgcggggttgatgtccggatgtcgccaaccgtctgttgttccgccaacaccgtgaataattgcaccaaactgaattgtttcttttctagtcattttacttcccccttttcaaacaatgctttttccaaatgttccaatccgatttctgtaacagcttggtaggtcccattttcaatgttgccaatttctacgactggtacgtggcagatgccgtatttggcttggagaacttctcgcaaataatcatggtcggtgacgtcgatatcttgaaaaacaattttttgctcgattaaaaaatctttgacatctttacaataatgacacccttctttactccaaacgacgacattagccatggacaacttcctcctttatcgattcacttaatagttgataggaataacgtttaatttcagcagatttgactggagttaaaacaacaaaatcttggatattatattcttttgaaaggcgtttaatctctactccgacttcttgtttggttcctgttatcgcaccaattcgttgggtaataaaccggtatgtttggtcgatatcttttacgtaggcttcggcttgttcgcgcgatccgacattaactctacgtccgtctgcaagctcgactttgattgactctcgctctggaatatgtcggtctgctgcgattttagtctcagctactacaacaattggtgctagttgaaaactagcttttgtgtttatttggtactgttcaaatagctcgcgtgcttcttttaaaacagcttcttctccgttaataaaataagcaaatacaaaggaaatccctagtttggcagcttgtttcgcgctcgatgcacttcctccaagcaaaaatatctctggtttgttttctggaagtggttttgctgcaatagttgtatctgaatgacgggtgacaaaatcgactagttcttccaatttagcatcaaatgtacgagtaggtttaacgaagtctttttgaagggcatcggttgctggctgaaatccacctggcgcttttccgacgccaagtgaaatccgacctggcgctaagttttcaagcacatgaaattgttcagcaactttatatggactatagtgttgtagcattattccgccagacgcaagcttgattgtgctcgtttttgcagcaatataccctaaaagaacctccggagctgcgccagctatttcgtctgaattatgatgctcggcaacccagaaacgatgatagccgagttgttctgcgagttgcgcaagttctactgtatttcgcaaggcttcacttggttgctcgcccggattaataatactttggtccaaaatactaaatcgaatcgtcatatgacacgctcctttttcacttctttgatttcatataaataatccgctgaaactcggtgtaaaaagcgttttgttctttcttcttttgtatgattaaacacttcatcaggagtaccttgttcgacaattagtccaccatccataaagacgacttgatctgcgactcgtttggcgaactccatttcatgcgtaacgacaatcatcgtcgcacccgcacgcgcaatctccagcatcacttccaatacttcccctacaagttcgggatcaagtgcggcggttggttcatcaaataaaatgacgtctggattaattgcgagtgctcgtgcgattccaacgcgctgtttttgtccgccggaaagttgggaagggtaggcactgagtttgtccgccaaaccgacttttgtgagctcccgttccgcaatttcgtgtgcaatttttttcggtattttccttgctaccgtaagaccctccatcacattttggataaccgttttgtgagaaaagagattatattgttgaaaaaccattgctgtatttttccgcagttgcaaaacttcttttttggatggtttcttgcagttaattatttggtcatgcattgaaatttcgccattttcaggtctttccagtaagtttaggcaacgtaaaaaggttgttttccctgagccacttggaccaagtattgttactacttcaccctttttcaccgttaaatcaattccttttaaaactttgttttcgccaaagcttttttgaatatttttaattgtaatcatactgtccctcctcgatatttagcgatattcttttccaaaatgtaattaattgcttcaatcaaaatagttaaaaaccaataaatgagtgcggcaccgataaatgcttcgagaaatgcgtaattgtctgatgctacaatcgttgccattccagtgatttctgggactgcgacgatggcggcaatggatgtggtatgtagaaatccgatacacaaattcgtgaaattcggtaaggcaatcatgaaggcctgtggtaacaatactttccgaatcgcttgaccatgcgtgtatcccaccgagtaagctgcttccatttgtccgatatcaaccgcaataataccggagcgcaaaatctcggttaagtatgcccccgccgtgaaagacagtgcgataatgacaaaaacaacgaccggtattttatttgcagaaatgcctaagccgaatgacttgctcaaaaaatccaccaataggggaatgcctaagtaaatcagcataatatgcaaaattgctggggtgcttcgaaaaaaagaaacgtaaaatttagcaatcggttctaaaaagcgaacgtggtacatccgaataagcgtcagaccaattgcgataatgaaaccgaataatatcggaaagaaggtcattgcaagtgttaacggaatcgtttttaacattgccattacagcagttccaataaaaggcacatctagcggcatcattatctctcctttataactcgatatcgaaaatactcgtgaatctggtgttttcttttttaactcgtttttcaatccatttgaaggaatattccagtaagacggccgtcaaatagtaaatgattgataaagaaatatagacctctaaagcgtgattacttagtgttatgagcgtctgacctcttcctgacatatccattacaccaatcgaaaaagcgagcgatgtatctttcaaataaccaatgactaaattgccaaaattcggtagagcttgatagagtgcttgtggcaaaatgattcgtaaaaacgtttggcgactactcagaccaatactataagccgcctctgcttgtccggcatccacgctattcacccctgcgcgaatcacttccgcaattgtcgccgcactgcttaatgcataagtcgcaatcgcagcatacagcggatccatttgtgataagtcaatgccaaatacgcttgaaagtgccggaattccgtaaaaaacaatgaataattgaaccataatcggcgtcccacgaaaaaacgaaatatacactctggcaaattgatctaaaattggaaccttataaattcgtggtaaagacagcagtactcctaatataaaaccaaaaataagcgagagtgctaaaatatacaacgttatgggtaaataaccagctaacgtcggaataaaatctgcaatcatttttacatcgaacgctttatccattttgatagcactccctctcttttaatattgttcttttgaataatctgcgccaagccatttttcacttaattttttaagtgttccatcatcaataatagattgaagcgcctcatctacctttttgcttagtttcgtttcatcttttccaagcatgaagtatactttcgcattagatagaacatcgccaactactttttctttgatagcgcttgttttattttggaaatctaccgcgaatggtgtagaaatcgttgcatcagcgcggccagttttcagttggttcgctgtatcatttgacccttgaccttcataagcaatttcaaaattattgccttgttcttcattgatttttttcaacacgagtgccccattcgatgttgcgcttgtgataacgcgttttccagctaaatcttttgtgctgtttatgctgttattactgtctaataccgtcaattgtaatgggaaattattgtacgctacatcattaaataaaaatttcttctcgcgttctttacttttttccatttgatgcgcgacaatatctacttttccagcaccaaggctaacgagtaagttagaaaaatccatcgttttaaatttaaatttatagccgggcaaacgtttgtcgatttcttttactagttcgacatcataaccagttaatttcccattttcatctaaaaagcagacatttggaaattgcgttcctgttccaaccgtgattgtttgtactttttgattcgctgcttctggctcctcttttccaccacatgcgcttaatgttaatgcagctgtaagagcaagcgccaaaatcccatatttctttttcatcttttttcccccttttttatgtccagctaggtattccaagtagtgcggcatcgaatttttccggaattaagattttccgcatcataacacccacatcgccgtcttcctcatgttcaaaatagacctcataaccgcggcgcagatacatatccagcaaccatggatgttttctggcagaagttccaagtgtcagtgccggtgcttttagcgtgtcacgaagtactcgttcttctacatatgttaataatttatcgccaatcccctgtcctgcgagttccggtgccgttgcaaaccaccaaacaaatggatatttagaaggaggtgagctgctctcccacggaaaacgaacggtaatcgtagaaattaatttgccgtttcgttccaaaacaaaagcagaagaattaacaatattttctgtcaccatcgccaaatccgcattcgttgacggccaatcaattcctaattctttcaccgattgaaaagcactcgacaacaattccaaaaattccggcgcatcatccacagtcgctactctaaaaatatcttctgtcatttcccactctcctccttaaacttctactgactgctgatttaataacgaaataaattggcctaaagcaatgtctaaccgttctttcgctgaagattcaatttcatacagcccatccccgagccgttcaatttgtttatctaccgtaaattgcccttttaatatcgtttccgctccaagttccttcaacacaggatcaagtgcgtattgcagtgcgagcaaatgtccatttgacccaccaagcccaagtggcaaaacgactttccctttcaatgctttgagtggcaaaagatccaaataggcttttaacactcctgaataggctgctttgaaaatcggggtagcaataataacgcccgaacttgattcaatttcactatttgccaattgaatatctgaatgcgcgaaatccgcggtgactaatgcttctgcgtttattttatgcacttcgatgatgttcacttctaagccattcgttactaattcatttgccgctagttgagttaatcctgtaagcctggattctgttttgattcccccagcaataattgtcactttccccatcaaatcgccccttttcaatccctataaacttacttggtttttggatattagctatactataaagtaaaagattgggtttggctaatcaaaaaaactaatagctaaccacagtaatactaatacttctgcctcaatccgcattattcctatgaattttatcagattaataaattgcttctcctatttttacggtgtatactgttagaaatatcaaaaaactccaatatgaagggggaattatattggaatttcgaaccattaaaactttttatacggtggttaatacgggaagttttcaacgcgcagcagaagtattaaattattcgcaaccgactatttcgatgcgaataaagcaattggaacaagacttagatgttcagttattcgaacgtggcaaaactttaaaactaacgcacgcaggcagattattttacgaaagggcgggccaacttatcgctcaatatgaagtactcgaccacacgatattcgacttaaaaaatggcaacgccggccttatcaaagtcggaatttcggagcctagcgccagtctcgtttttccgaaaattttaaaaacgtttctagcggatttcccgaaattaatggtgaatgtatcggtggatgatgcgaatacttgtagccaaaaactcattgatggggaaattgattttgcgatttgcggagaaccagagctgattttggagaacttctattttccgtttttccatgatacgttagatttaatcgtctcagaaagccatccgttagcttcacgtacttctgtggagttacgtgatttacgcgatgaatgctttatcttcacaccggcaaattgccccatccgcatccaaatcgaacagcatttaaaacgcgctattggtagtgattataagaaaatggagctcacaagcagtatgtctcataagtattttgtccgtgaaaacgttggtgtatctatttttactagcaccgcgcactcagaactacttgatggcacggtccgcattccgattgaaaatttaccaatatcaccgccaattggacttttaaccaaccaaaaagaaaaagattttgatagcacaacgaaagaacttatcgaccggattatttattattttgatgataaaaaaagacagctaggctaaaaaattagcttaactgtctttttttattaaaattctaattgcatattcgcctctatcgctagcaaattatcacgatacactttcatttctttccgcgtaatcgtgcctttttcaaagtagcgttgaattgtctcgcgctcaatttgtgaagccaggtcgattgttgtttgtagcgcttcatcattgctttcttttttatttttcccacgacctaatgctcgctcaaaattcatcaaataaagcgaaatgatttctgggttatactcatttgaatccagatcctgtagcttttgcatgacaaatagattgttttcattttgtagtttggcaatttcttttctacgttcttcaaaagtaagaggaacaaatcggaagtctcgaaaacgatgacttaacaattggcgataccgcattctcgctcggtacttctctgctcgtgtttggacatatagtcgttttccaagacgcatcatatgcgacagccccacaccagtatcaatttttcgttcaaatactaatcttctcgtattttcaagttgccattcttgcgttaagcgccgcaattctttttcagtagcatttacttccttatgctccattaaagagaaaatccgattattatacatattcaacactttattcatttctactgcattttcatctgttttatacgcctgtaattgctgcacaatatcgcgaagtagcacaatatctgtcgtatgatccgccgtaactttatctttcttatctgcaaaaagtggtaaagtgaagttggccaaaagtagcgtcgtaataataactccagcagcaataaaaataagtaaatcacgctcaggaaacgcattgccattaccaagaacaaaaggtaacgaaagcgcactgactaacgtaattgtcccgcgaacaccagccacagtataaagaaaagtatttttcaatctgctaactaaatccactttcggattttcctcgtaattgcggaaaaacaagatccataaaaatcttagtccgagcagtaagaaagtgattcctattatatacacgaatagcatacctttttgaatattggcgtcttgccaaatcgtcatcaaaatttgcggtaattgtgtccctagtaagataaataccaaaccattcaaactaaaaataataacagaccacgtgttttttgaaagcaagttcaattgcgcaatttcaggatttagtcccttgtaactaaatgaatgcaccattccaccactaactaccgctaaaatcccgttcactccgactttttctgctaccataaaaattaaaaatggtaacaaaatttccatcagcataaaagaagtcatattttcgattcctagctgacgtaaaccacgcatcaacatgattttcagtaaactaagtatagcacccagggcaatcccgcctaatgaaagaagcaaaaagcttgttccagctgacataaaagaaaatgttcccgttacaagcgccaacacagcaaattggaacgaaacaagtccggaagcatcattaataagcgattcgccttccaaaatatgcataattttatggggtactcttactttttcagcaagcgcacccaccgcaacagcatctgtaggcgccagagcagccgcaagtgcaaacgccgctgcaaaaggtatcgcaggaattaagtagtgaataaaagcacccaaaactcctactgtcacaaacactagtccaatcgataatgacaaaatagcttttcgatttttccataaagatttcttatccgtactcgccccatcattaaatagaatcggcgccataaatagtaacaaaaacaattccggattcaaatccatcgtatgatctccaagtggaatcgctaaaataatccccagcactacttgaattaaaggtaccgcaatacttggcaaaaatcggcttagtacattagataaaaacaccgcactcaacattaataaaatcagttcaaatatttccattaatacatccctcgttcccgtatcaacaccatccccctgagccagaagcgtggcatttcttccgttcccatattagcaaaaaaacttttcgaaaacatccgtctctgtatggagtttcctacgtatgctcactttttctgatagacaatttgttcatttacaaccgtcatcacaacgctcacttgacgaagttcagcttgtttcatttgaaaaggatcttctgccaaaatcgtaaaatcagcaacgaagcctggtgcaatttgtccgcgtgtagttgttttgtagctcgcaaatgccgcgccttttgtatatagttgaatagcttcaaatacagtgagtgcctgctctggccaatatcccactccatccaaatctgcattcgccgttctagtaacagccgcatggataccccaaaacggattcggtacttcaatcggcgcatcgcttccaccagctaatgggaaaccagcctgtagaagcgttttccaagcaaaagctaacggcggatgattatctccaagtacttctagcgcccacggaagatcactcgccatgaattgcggctggatatcaaataataccggcaacccagttgcttcttctattagagcttctgtaagccaaggtgtgtggattagtctgtcgtattgcccttctttaggcggattggcacgtaacgttcgaatgacattagcaaaagcttgatcccctaaaatatgaatagcaacaggtaatcctgcttttcgcgctgctttaaccaaatcttcaaacgcttgatcagaatgaatttgcagtcctttttcactagggttgtccgcatatcccgcactcatcaacgccgttcgcgagccaactgttccatcatagaaaattttcatcgcccctaattctaaaaaggcatccccacttacgaaactttcattagaagccgaaaaagcagctagttctgcgtggtgaactagcaaatgcgcacgaaacggcattttattagacccaatagtatttcgaaaagctgctagggtcgaagcgaaccccgtaaaatagtgtaaatcttccgagtgtgcacccgttatgcctttcgaccataaatcagttatcgcgatttcaagccatgcgcttagttcagaaggcgttgctgcagggaaggaatctatcgccatagtcgttgcattatcccttaaaactcctatgaactcacccgttttatcccgaacaatttcaccaccaccatcaaaaccagtttccgaaaaatccgcaatcttctcttgtaatgcagaattaatagaaacactatgataatcaatgcgccgaactaaaatcggattcgtttggcttacttcatctaaatcggccaaagaaatcaacgtttgttcatctgaccacttattttcatcataaccttccacaaacaaccattcatcactagcaatttgctttgttctttcagcaatcagcgctagtgcctcttttttagtagtggtttggtttaaattaagccgctctaaagcttgtccataccatagcaaatgaatatgagcatcaacaaatccaggaaataccactttcccttctaaatcaatcgtttcagtgatgttagctacatattgtttttctaagtccattgcttcaccgaccgcacaaatttgaccgttttctgttaataccgcagaaacctgatccccttcagctgtcatttgataaaaggtagcatttttccataatttcatttttcattccccctgattgacggaaattttcaaagcagctttttcttgttggtcctttttctgtaaaatttgttgtagtgtaatactaattaatgcgcagccaagtaaaataaacgcaccaatgaataaagctttgataccaccgagattttgaacgacaattgctcctataaacggtgcaagcatacgcgccgctgttgccatcccgttcacaagtccttgatacaagccagccgctccttttggtgcgagttgataagcaatcgttggaatcgctggccaagcaaacatttccccgagcgttaagaaaatcattccgagtacaaagccactatagacacttgcattcattgccacaacaaaagataaaataaataagaaaataccgatataaatttgtacaagtaagtattttttaaatctatttacaacggggattagaacgagctgaccaagaacaataagcgcaccattcaaactccataagttcccatattcactagatgtcacgccttttatttctgtcatgtaagtagataaattcgactgccactgcacatgtggtaattggcaaagcaagtacgtcaataataatagaataaaagaacatagagctagcttagtcggaaattcacgtttagctccttttttacgatgttttgtttcggcacttacccgctccgatttccagtcaattttgtggaaaaagaagaaaaaatatcccgcgaaagcaatcgcaaatacaaaagaaccaatgtatacgtgactcataccttgttttgccagaagtcctgcaagcaagggaccaacagctacgccaatattttgtgccacgtaaatcgcattaaacccagttctgccgccagtcggatgcgttaatcctgctgctgcgtataatccagagaataccatccccatcgcgataccgaccgcccataaattccaaataaaaaatggaaatccatggaaaaagcacaacgaagccgtcgatagtactaagataatcgttccaatcgtaagtgaaataaaaccagaaaaccggtcaaaaataattccgccgataatactagaaacaatccccactcctgaatttatcaacaacactaatgaggcgtccgttgtcgacatccctaactcttgcgtcatgtaaatcatattgaaaggccaaataaacgagagccctgtatatagtaacaccatcccaataataacaatccataaatcctttggtaaccattttgtcatttcctacactttcccttcattaaaactcaccttttttaggttatcacaaccatccacattcgaaaagaaaaacttcatcaaaaaaccacctagcaaaatttgctggtggctaataagggactggcgataaatccctatcatggttacttataagtgtactatgaattctgatttttgtctgtgctaaattaagaaatatttcaattatttttttgtaaaactttattataggctaaatctctcaaataattatgaaattgtaatacatctatttcaaggtaatagcctaattcatatagaatatgctgctgcttcaattcttttacttgaaaagcacataattctttaggcacagcttgcatcatctcttgtctaaaaaaatctagcgctactttccaggaagttgtatgtaatctcaaaggcatttcttgaatgaaccactgaatgcaatcaatttcatttcgatctaaaaaattcttttctatcactgtcaaatcagcaaccttaaccttacccatacttttcaagatatcctttacatatgttaaaggaattttccaggctaccgttttagaaaggggttggatttttgtctcttctcgagtaaaaccgagaatgcttccttttccccaagaactgtttcttgcagcacattgcgttacacttccctcgtcaattgcatacacatactcattgttttctggacaatgaacaatttcttcctcgttccaatataccaattctgctacttcttgaaactttggattattagttaatgtaaacattaattccgtagtaaacctttcctccatttatcccgcctcctcaaaatcctcacatcaattcatctctctttatcataataaaaaaaaagcgagcaaagagttcttaaagaaccatcttctcgcttcttatgtccattttgtgacaaaatcacttttccagttttattaatgttatttttttaacattttaatgaaaaacaatataaaaaattatcgttatttccgagattcaccttttcgaataacccaccaaagagaaagacatgtaataccttggaaaatgaaaaatattccaagtataatcccaatcgcaattgctactagcatgttcgtgaacaaggaaataatagcaataatcaatcctataattcccatgataagtagtaatgtccatcctggaaaaccttttacagcaaacgccgttaaaatacgtaatatcgctgaagctaatatccaaatcgcgaatataataatgaaaacacgttccgccatatttgactcgaaaatagcaaatccaccaataaggattgatagaatcccatcaagcattatccatttggaaatactccaatatttatgttctccaaaataagaaatcacttcattaatcccatttaaaactaaaataatcccaataaaaatagttagtgcttgcagtgatgtacttggattaaacattaaataaataccaagaccaatcatcgccacaccaagtattaaaacaaaataagtgtataattttctcatggttctgcccccttttttagtggttagtaagtaatgatcctgccgcttcatcaataataaatacgacattcggatggttacgtaaaatcgacgctggacagttttcatcaattgggccttcaagtaaacctttaacagcctctgcttttcgttcaccggaagcagtgactaagatttgttttgcatccatcatatcagctaatccaagagtaagcatttgggacggcgcttcgtcttcttttaaattgttgtacatgatggtgcttttaatagtagattcatcgctatctgccaaaaacaatcgcgcatcaaatggcgttcctggttcattagctccaagatgtccatttactcctaagcctagaatttgtaaatcacgttcattttcagccaaaattttcttataacgagcaatttcgtctgtaaagtcagctaggctgccgtccaataattctactctttttggcattttgttaattaaatcatagaatttttggtgcatatacgtgtaaacagtgaaggaagcatcgcgcttagccacatactcatccaaattcattaaaaatactttttcgattggaatttcaccggcattaattccttttacaagcccctcgaacattccatcgaaacttgctcctgtagttgtatttattaccgggttatcattttcgttaatgacttgttcaactacttcgagcgcttcttgtgacatttctttgtatgtttttgttctgattaatttcataaaaatcctcctctatatgctttcattaccccaactattttttctaaagcaaaccatgctttagaaaactggcatataagccgtcttcatctactgatttagtaacatcatcggcaagtttttttaattcttcttttgcgttccccatagcaataccagtcttgcagtaggtgagcatttctgcgtcattcataccgtcaccaataccaatggtggcttttttttcaccaccagtatgtttgagcaagaactcaattgccgtcgccttatggatatcaggaaccattaattccccactatcatcaccaaaaactggcacagtacaatgcattacttcaaacttgccactaaattcttttttaatttcttcaaaaggtacggctttattttctaagaaacaagctttattcacatctgtacgatacaaattggtttcaccgtaagtaagactttccataaaaggatgtggattatttgcttttttctcacgtgcgataggatcattttccacatcaccatatactaatctatctaaatgggattcaagattcgggctagcaaatagtccaccatttgattctaaataaaaatccaattgtttttctgtaaagaaatccaccatatgaacgacatcttcattcgctacttttttatggtaaatgatttcatcgtctacttcgatatagccgccgccagcaccgataatgccatcaaatccgattgatataatggattcatataattccggtttagaacgtcccgtgcacaagtacacttgatgtccgttgttgcgtgcttttattattgcagttcttgcggattctggaacaagcccatcatcatttacaagcgtaccatctacatctacaaatactatttttttcgtcatgcaatacctcttttcgtatgttaatagtttaattatagcatttctttgcagggaaggcgcccaattgcgtaacaaaaaagcaagattcccattttcaggaaaccttgcttttaatttgtttagttttctaaagccattaatttttgattatcgtcaagagctgattcatgtgcatcgtgacgttttttcaagtggctcatggatagatatagtaagccaacacatgcgaccatgatgattgtaagaatgagcatcgacatactgtatacatttggtcccataccggctgccagtgactctctaaaggcataaatcgagtaagtcattggtaagaacggatggattaagttgaagaaccatcctgtaagtggcattgggaatgttccacctgatcccgctaattgaacaatgagtaataccatcgcgataaaacgacctggattatcaaatgtcatagcaaggagcatgataaggaacatataagcaagagctgtaataatcgccgttccgaagaattcaacgatgctatccggtcttaatcctagtgctatcatgatgccaccttcaagaagtgccatcgcaacagctgcgacaaaacctagtgataatttacttaaccaccatttataagctggttgaccttccattgaaacacgtctaattggcataatgaagttaaatacaagtgcaccaacatatagagcaagtgacaacacatatggtgctaatgcgtgaccgtaattacttacgtgcgtatattcattatgtgcaagttttgttggagctgcaatcatgttgaatgttttatctgtcgcttttgtatctttgacttgctgtgctccgtctgctagtttgtctgttaattctgtgctgccgtctgttaatttagtaagtccatctcctaattggaaggaaccattcgctagtttagaagaaccatcggcaattttggaagagccatctgcgagttgtcctacgcctgaaactagttttggtgagttagctgatagttggtttagaccgcctgctaattggtttgaacctgcttgtagttgattaacaccacctgcaagtgttggaacttttgcagctaattggtttgttccgccttgtaactctgttgctcctgagcgtaatgcgccggaattacttgcaagtttgttaccaccatcatttaacttgctcaatccgttttccatacttgcactacccgcagcgagttgtccgacgccagaagttagtgttggtacttggctgttaagttggtttgttccagcaactaatttagcacttccggcttgtgctgatttgagtccagcagttagttggttcgcaccgccaagtaaagtttgactacctgagccattaattgcttggtgaatactgttaaatgcttcgtttgttccaccgtgaactgcttgataaccagcggaaattttcgctacgccagtttgcaattctgttacttgcgtttgaattgccgctaaatcaagacctgataagccgctttgtagttgttctactgttgctacttgtgtagcggatttttgtgtttctttatctaaatcggcttgaatagcatcaataattttttgtttatcttctgcactcacgccagctgtcgcattaatttttgatttaattgcttcagcatcgaagttcgcattagatttaataaatgttaagccattttgtaggtcgcttaaacttttttgtagtgtagcgagttgttttgcaagtgctgcatcttctccgttcacactttggtttaattgatcaataccttgttgtaaatcgttcataccttgttttaattgtgcaattttgccttgtttatcagttaaatttccgtctaattctttaagtcctgctgaaagtttgttacttccatcgactagtgaatctaggccagttgctaagcttttttgaccattgtttagttgtgtaatgcctgatgctagggttggtacactgccattcatcttatttaatccatctgaaagtgcagtagaaccagtgtaagcttggttaattccacctgctagtgtatctacaccagatgtataggtagaaactccgctagctaatttcgttgccccgccgtcaagtgcagccacaccgtctttaagtggtcctacaccagcagcaagcgttgaaacaccagcatttagtttatcgccaccagcggccgcagtgttcacaccatctgtgtaagttttcaaaccaacttctaacgtattagcgccatctttgaacgtcaaagagctatctgcgagcgtttttaagttagtagaaatggttttattaccttcttgtgatttcacaagaccatctttaatttttccagagccatcagcggcttgggcgaacccgtcaccagactctttaattttatcaaaaattgcttctgcgtatgattttgttacttcagcggaaacctcgctcttcagttgtttggcaccttgttcactcacgacttgacctaaatagttcagcgagccgtttgttttataggataattccatttttttcggatctttatctaaaacggatgctgcatttttagagaaatcttttggaatcgtgacaatcatataatatttgccatcttttaaaccttgttcagcctcttctttggaaaggaaattccaatcgagttctttgttgcttttcagttttgtgactaactgatcgccaacatccattgtttgaccgttataatcaaccggtttgtcattgttaactaccgctactggtaaatcccctgttttgccgtacggatcccagacggattttaagaaaaagcttgcatataaaagtggaataaacagaataactacaaatgataaaagtagtattttgtttttaaataattttttccactcattttttaccatatccattttttaccgcacttctttcttttaaagatttattacgcttcgttccaatctatgatagtggttcgttctttcccaatcacttgctctactaaaacagataatttttgtgagtataaataattagcgtattctttatcagcgtttctaaaagcacttgtaatggtgtgaataccggattctgcaaattcatgatagtccgagaaaacagtgtggattaagtcagaatctgggtatgtatcgatttttccttccactgcttctacgatatccagcaaattaatttcttcagggtctttagcaagcgtgaaaccaccgttattacccgaaactgaattaatcagcccgctaacgactagcttcctcaaaattttactaatataagacggcgacgaatcacgcaaacggtgatgaatagttacggaagaaatgggaacatctaccttctgggtgtacaacatcgtcataatacaaaaaacctggtccatacttttgctcaacttcatcattaaatcctccctcttcccattattacctttcaatatccttaatggacatttaacatctatatacaatacacccattttttttaaagtgcaagagttttttactaaaaatggaaaaaaatttaatgaatgcgtttgctgcgaatagaacaactataagcattgtctcaaaaatttttcctggctaagaaaaaaactggaataattttcgaaaacaaacgtgctaatcttatacatgttccaacaaacaattacttaggaggtgcttttctcgtgttaactgatgatgttccaaaaaaatcacatttaccattaattaagcatcattctaattacttatagcttcgtttagttgtattttcgcaaacaaaaaattgggaggtaacatacaatgtctaaacaagcaaagtctttaaccttattcggatttttcgccatcacggcttccatggttatgaccgtttatgaatatccaacatttgccacttccggctttcatctagtttttttcctacttcttggtggatttttatggtttttgcctgtagctttatgtgcagcagaaatggcgacggtggatggttggcaagaaggcggtattttttcttgggtgggaaatacactcggggaacgttttggttttgccgcaatcttctttcagtggtttcaaataacggtcggattcgtgacaatgatttactttattctcggtgcgctatcctatgtatttgattttcccgcactcgaatcgaatccttttattaaatttattggtgtgttagttattttttggggacttactttttcccaattaggtggtacgaaaaacacggctaaaatcgcaaaatttggttttattatcggtattctcatcccagcaattattttatttattttaggtattgcttacgttgctggcggaaatccacttcatgtcactttttccaaagaggcgtttatcccggatttctcaaaagcttcaacattagtcatcttcgtgtcatttatactcgcttacatgggtgttgaagcttccgcgagccatgtcaatgaaatgaccaacccaaaacgcgattatccactagcaatgattatgctcgttattttagccatcgcactgaatacaatcggtggcttaactatctctgctgtgttacctttaaaagatttatccctcagctccggcgtcgtgcaaacattccaagcactaattttacattttggttccggcttaggttgggcagtaaaactaatcgcgataatgattgcgctaggtgtcatgggtgaagtcagtgcttgggtagtcggtccatcacgcggcatgtacactgctgcagaacaaggcttacttcccgaaaaaatgaaaaaagtaaataaacacggagtccctgtaccacttattatggttcaaggcgtcgtagttaccatttgggcagctattctcacattcggcggcggcggaaataatttatcattcctaactgccatttccttaaccgtagtcatttatttagtcggctatttactctttttcatcggctacttagtacttattttcaaaaaatcgagcttaaaacgcacctatcaaatccctggtggcaaaattgttaaagtgattgtagcgctaatcggcttagtaacatccatttttgctttgtgtatctcttttgttccaccagcatcaatcgccgcaaaaagcgacacgacatacatggttatcttatcaatcagctttatcgtcactgtgttaatcccatttatcatctacgccgtgcacgataaaaaagacatcacaccgaaagatattacgcatttagactcaagcgacatcaataaattcacccacccaagagctcgcggtgaacacattattaaccccgacgaaaaacatattatgaatcaagacaaattataggaggaaaaaatcatgttatatagtaaagaaaataaagaaagttatttagaaccagttttcggatcaagtgcagaggatcgtgatattcctaaatacaccctcggaaaagaaccactcgaacctcggattgcttaccgtttagtgaaagacgaacttttagatgaaggttccgcccgccaaaacctagctactttttgccaaacatatatggaagacgaagcaaccaaattaatgtccgaaacactagaaaaaaatgcaatcgataaatctgaatacccaagaacagctgaacttgaaaatcgttgcgtcaatattatcgctgacttatggcatgcacctaaggaccaaaaatttatgggaacttccacaatcggctctagtgaagcgtgtatgcttggcggaatggcaatgaaatttgcttggagaaaacgtgccgaaaaacttggcctagatatttatgcaaaaaaaccaaatctcgttatctcctctggctaccaagtatgttgggaaaaattctgtgtttactgggatatcgatatgcgcgttgttccaatggataaagagcacatgcaactcaataccgatcaagtccttgattacgtcgatgaatatacaatcggtgtggtcggcatcctcggtatcacttacacaggccgctatgatgacatctacgcgctaaatgaaaaacttgaagaatacaatagcaaaaccgattataaagtctacattcacgtcgatgcagctagtggaggtttcttcactccatttgtcgaacctgacattatctgggacttccgcttgaaaaacgttatctcgattaacacttccggtcataaatatggcctcgtttacccaggcatcggttgggtcctttggaaagatgaaagctatctaccagaagaactcatctttaaagtcagctaccttggcggagaaatgccaaccatgcaaatcaatttctcccgcagtgcgagccacatcatcggtcaatactacaatttcttacgctacggcttcgaaggctaccgcaccattcaccaaaaaacaagcgatgtagcacaataccttgcccatgcagtcgaacaaactggctactttgacatttttaacgatggctcccacttaccaatcgtctgctataaattaaaagacgacgccaatgtaaattggacattatacgatttagcggaccgcctccaaatgcgcggctggcaagttcccgcatatccactaccaaaaagcttggaaaacattattattcaacgttacgtctgccgcgctgaccttggtttcaacatggcagaagaattcatccaagatttccaagcctctattcaagaactaaacaacgcccacatccttttccacgatacccaacaatccggcgtccacggcttcacacattaataaaaaggctagcctctcaaataggctagccttttttcatgttcttttattctaagagactgaatcacttcttctacatcttccaaatccctatcaaaaaacgccaatgaaatcggaataatagtaccttctaccgcttccttcaattccaattcgcagttaggattacagagtacaatcgttggctcatccgattcttctagtaacctgtttaaatcctccaccgaattaaacattttctcatgcaccttcaccttccgcccaagctcctgttccacctgaaatttacaagactcaaaattaattaaattgaacgagaaaatacaaatttgcaccggattattccatttataaataagtggatacaaatgaatcgtcaaataattaatatgcgaatcaattaattatactcgccgtccactattctcattccagcgttttagcacatttttcacaaccaagtaaagtggctgatactttttatccagcaaccgctcattactcggaataagtccctgcaaattaaacaacgtcttcttcaaaaagtaacaaagtgctgcccgaaaaagcgagtgattaacaacttccgcgccaaaatattcttcaaataaatcaaccagcgactgcaaatctgcatttttcattatcaactcatcaaattgctccagctccacctttttcatggaagcatcaataatactaaaattagtcgaataataaatcaacatcaaatacaaataatcattatacgaaaattcctgaccaagctctttttctagtgtttccttactacttttctgaactatatcaagaaatcttgaagactcaatatatttctgacactgttcatccaaaataatcgcactcgttggaatatcccttttaaataccatcgaaatcaacgaccgaaaatatgcatggccctccgcattatgcgccaatgtatcaatattaatcagcaaattcaacgtcgccataaagttatcaatcatttgcttctcctcatccaaaagcggataaataagcacaccatattcggcttgaagcaatgcaatcaaataccgaacccggtactcctttccagtaattcgattattatcaagcttcaaatcaatctctcgaagaaactcttccaccttatgcttcaggcgatacgcatgcgaatgagaaataaaataagtatccataaaatctgtaaacttgttctcctccacattcgtaacaaaaaacgccacacatttcaaaaacattgagttatcatataacttatacaaaactttccgctcagttactccgttttgtaactgacattgatacacccaattatccgcacattctttcatctgaataagaattaagccatccaattcctcattcaacgcatgaatatccgaccgcaccgtcacccgagaagtccccatatattccgcaatttcatctaaatttgtatgcttattcttaagtataaaatcacaaatcaaacattttctcttaatatccttttcgataaaattcgtaagcataactaccctctccatgaaagattaatacacaacaattttatgtgattatattaatatgttaatataatcacataaaattgcaacttgtcactatataatttttttaagtatagttatatcattattttttttgtaagtggcataacatatcattaaactccgtcaaaaggtccttttgatcaggaaaagtaatatttctatttttgtaatttattcttgaaaatatttaactatatgcctcttctgctaaattattttttctcatctctatttataacacaactttcaagcagaatccatctttgaaataaaaaataccaacgaatcgttagaaacgttggtatcatagtataccggcggccggggtcgaaccggcacgcccttgcgggcacaggattttgagtccagcgcgtctgccaattccgccacgccggcgtaacaatataataaattataactttaaaacattaattatgcaaatggaggcgccaaccggatttgaaccggtgataaaggttttgcagacctctgccttaccacttggctatggcgccgtacaatgttcaatttaaaagcggaagacggggttcgaacccgcgacccccaccttggcaaggtgatgttctaccgctgaactacttccgcattaactgggccagctggattcgaaccaacgcatgacggagtcaaagtccgttgccttaccgcttggctatggcccaacaattatattagaattaaaaacaaaaagggcggatgatgggaatcgaacccacgaatgcctgaaccacaatcaggtgcgttaaccacttcgccacatccgccattattttaatatatggcaggggcagtaggaatcgaacccacactggaggttttggagacctcagttctacctttaaactatgcccctataataatggtggaggggagtggattcgaaccaccgaacccgaaggagcggatttacagtccgccgcgtttagccacttcgctacccctccatattaaaaaagaaaaaaagtggcttgggacagaatcgaactgccgacaccttgagcttcaatcaagtgctctaccaactgagctaccaagccataatggcggtcccgacgggatttgaacccgcgatctcctgcgtgacaggcaggcatgttaacccctacaccacggaaccactctattgcgggggcaggatttgaacctacgaccttcgggttatgagcccgacgagctaccagactgctccaccccgcgacaatattattataaaattaatggtggaggttaacgggatcgaaccgctgaccctctgcttgtaaggcagatgctctcccagctgagctaaacctccataattactattctactctaaaaacataaaaatgtctctagtagattaataataaatgacccgtacgggattcgaacccgtgttaccgccgtgaaagggcggtgtcttaaccgcttgaccaacgggcctaagaaaaaatatgattctttattacgtgtaaacggagagcaagggattcgaacccttgagacagcttacaccgcctacacggtttccaaccgtgctccttcggccactcggacagctctccagaaaatggctccacaggcaggactcgaacctgcgaccgatcggttaacagccgattgctctaccaactgagctactgtggaataataaattgcccggcagcgacctactctcgcagggggaagcccccaactaccattggcgcagagaagcttaactaccgtgttcgggatgggaacgggtgtgaccttctcgccataactaccagacaatattgagttgttgaaagattgctctctcaaaactagagaagaaagtgttcagttaggtaacttcgtttcattttttggttaagtcctcgatcgattagtatttgtccgctccatgtatcgctacacttccactccaaacctatctacctgatcatctttcagggatcttactttccgaagaaatgggaaatctcatcttgaggggggcttcacgcttagatgctttcagcgtttatccctgccacacatagctacccagcgatgctcctggcggaacaactggtacaccagcggtgtgtccatcccggtcctctcgtactaaggacagctcctctcaaatttcctgcgcccgcgacggatagggaccgaactgtctcacgacgttctgaacccagctcgcgtgccgctttaatgggcgaacagcccaacccttgggaccgactacagccccaggatgcgacgagccgacatcgaggtgccaaacctccccgtcgatgtggactcttgggggagataagcctgttatccccggggtagcttttatccgttgagcgatggcccttccatgcggaaccaccggatcactaagcccgactttcgtccctgctcgacttgtcagtctcgcagtcaagctcccttgtgcctttacactctgcgaatgatttccatccattctgagggaacctttgggcgcctccgttactctttaggaggcgaccgccccagtcaaactgcccacctgacactgtctccccacgcgctaagcgtggcgggttagaatggtcatacagccagggtagtatcccaccattgcctcctcgtatgctagcgcacacgtctcttcggctcctacctatcctgtacaagcggtacaaacattccatatcaggttgcagtaaagctccacggggtctttccgtcctgtcgcgggtaacctgcatcttcacaggtactataatttcaccgagtctctcgttgagacagtgcccagatcgttgcgcctttcgtgcgggtcggaacttacccgacaaggaatttcgctaccttaggaccgttatagttacggccgccgtttactggggcttcaattcgtaccttcgccgaagctaagcactcctcttaaccttccagcaccgggcaggcgtcagcccctatacgtcaccttacggttttgcagagacctgtgtttttgctaaacagtcgcctgggcctattcactgcggctctctcgggcttgcaccctaatagagcaccccttctcccgaagttacggggtcattttgccgagttccttaacgagagttctctcgctcaccttaggattctctcctcatctacctgtgtcggtttgcggtacgggcagtactactcttcctagaggcttttcttgacagcgtgaaatcaggaacttccgtacttaatttccttccccatcacagctcatgcttcgcgagaagcggatttgcctacttctcacactcactgcttggacgcacatttccattcgtgcgattccctatccttctgtgtcaccccatcggttaaacaattagcactggtacaggaatctctacctgttgtccatcgcctacgcctatcggcctcggcttaggtcccgactaaccctgagcggacgagccttcctcaggaaaccttagatattcggtggaagggattctcacccttctttcgctactcataccggcattctcacttctaagcgctccaccagtccttccggtctgacttcaccgcccttagaacgctctcctaccacgaacctctaaagaggttcatccacagtttcggtaatatgtttagccccggtacattttcggcgcggggtcactcgaccagtgagctattacgcactctttcaatggtggctgcttctaagccaacatcctggttgtctaagcaaccccacatccttttccacttaacatatatttggggaccttaactggtggtctgggctgtttccctttcgactacggatcttatcactcgcagtctgactcccgagtataagtacatggcattcggagtttatctgaattcggtaacccgagaagggcccctagtccaaacagtgctctacctccatgactctttacctcgaggctagccctaaagctatttcggagagaaccagctatctccaagttcgattggaatttctccgctacccacacctcatccccgcacttttcaacgtgcgtgggttcggacctccagtaagtattaccttaccttcatcctggacatgggtagatcacctggtttcgggtctacgacctgttacttatgcgccctattcagactcgctttcgctacggctccgctttttccgcttaaccttgcaacaaatcgtaactcgccggttcattctacaaaaggcacgctatcacccattaacgggctctaactacttgtaggcacacggtttcaggaactgtttcactccccttccggggtgcttttcacctttccctcacggtactggttcactatcggtcactagggagtatttagccttgggagatggtcctcccggattccgacggaatttcacgtgttccgccgtactcaggatccactctggagggaaagctatttcaactaccgggctgttaccgtctttggcgggcctttccagaccgcttcatttataactttcttttgtaactccgtatagagtgtcctacaaccccaagaagcaagcttcttggtttgggctctttccgtttcgctcgccgctactcaggaaatcgatttttctttctcttcctccaggtacttagatgtttcagttccctgggtctgccttcctcacgctatgtattcacgtaaggatactatccgactaaagatagtgggttcccccattcggaaatctctggatcaacgcttacgtacagctccccaaagcatatcggtgttagtcccgtccttcttcggctcctagtgccaaggcatccaccgtgcgccctttctaacttaaccaatttacttctacgaagtaaaggttgtttttctgattttccgtatcagcgatgatacatccaatcagatgaaagattcactttcagatgattctcggttacttgtgtcataaataataaattatctatgctaactttactaactttcttatctagttttcaaagaacaattttggtggagcctagcgggatcgaaccgctgacctcctgcgtgcaaagcaggcgctctcccagctgagctaaggccccataaaaggatatgattatttgtatttcttgcgtcagaaagaaaaagtgggcctaaatggactcgaaccatcgacctcacgcttatcaggcgtgcgctctaaccagctgagctataggcccgtcaaaaatgtagtggcgcgatgcttcaagcatagtgccttgcatactttatctgacataaaagagagtaacctctcaaaactgaacaaatagagaagaacgaaaactcacaggtttccttttccttagaaaggaggtgatccagccgcaccttccgatacggctaccttgttacgacttcaccccaattatctgtcccaccttcggcggctggctccataaaggttaccctaccgacttcgggtgttacaaactctcgtggtgtgacgggcggtgtgtacaaggcccgggaacgtattcaccgtggcatgctgatccacgattactagcgattccggcttcatgtaggcgagttgcagcctacaatccgaactgagaatagttttatgggattagctccacctcgcggcttcgcgaccctttgtactatccattgtagcacgtgtgtagcccaggtcataaggggcatgatgatttgacgtcatccccaccttcctccggcttgcaccggcagtcactttagagtgcccaactaaatgctggcaactaaaatcaagggttgcgctcgttgcgggacttaacccaacatctcacgacacgagctgacgacaaccatgcaccacctgtcactttgtccccgaagggaaagctctgtctccagagtggtcaaaggatgtcaagacctggtaaggttcttcgcgttgcttcgaattaaaccacatgctccaccgcttgtgcgggcccccgtcaattcctttgagtttcaaccttgcggtcgtactccccaggcggagtgcttaatgcgttagctgcagcactaaggggcggaaaccccctaacacttagcactcatcgtttacggcgtggactaccagggtatctaatcctgtttgctccccacgctttcgcgcctcagcgtcagttacagaccagagagtcgccttcgccactggtgttcctccacatatctacgcatttcaccgctacacgtggaattccactctcctcttctgcactccagtcttccagtttccaatgaccctccccggttaagccgggggctttcacatcagacttaaaagaccgcctgcgcgcgctttacgcccaataaatccggacaacgcttgccacctacgtattaccgcggctgctggcacgtagttagccgtggctttctggttagataccgtcaagggacaagcagttactcttatccttgttcttctctaacaacagtactttacgatccgaaaaccttcttcatacacgcggcgttgctccgtcagactttcgtccattgcggaagattccctactgctgcctcccgtaggagtctgggccgtgtctcagtcccagtgtggccgatcaccctctcaggtcggctatgcatcgttgccttggtaggccattaccctaccaactagctaatgcaccgcgggcccatctgtaagcgatagccgaaaccatctttcaaaagcgtggcatgcgccacactttatcattcggtattagccccggtttcccggagttatccccaacttacaggcaggttgcccacgtgttactcacccgtccgccactaactttggaagagcaagctcttcctccgttcgttcgacttgcatgtattaggcacgccgccagcgttcgtcctgagccaggatcaaactctctttaaaatataaattgaatttgaatacttattcaacaccgtgaataagattccttgcgtcaaattgacttcgctagcaattaaattactagtttgttttgttgaaaacagctttctgttttctgccctgcgattaccagtgagactttacgtctcattgcttttcgtcttcttctttgttcagttttcaaaggtcaatttcttttgttgcgaaagcgttttgtccgcatcagcaacgtttataaatataccaagatttttgcctttcgtcaatactttttacaaagttttttaaataaagatgaaaaaagatgaattccttgcataaatccgcatttaaataaggatttataggggcgaaatcattatgttgtataaatttgcattcctttttcttcaaattgttcttttagtaccggatctatttcttttccggtgataatggaagagatttcgtctagggctgcgtatttgtaaagtgaaatgcggccgaacttggtgtgatctgttactaagataacttcatcagctgagtggagcatttgttgcttagctgggatgaggtattcgtcgtagtgcattaaacctttgtcgatatcgagagctggtgtggttacaaatgctttatgtacgtgaatgctctgcaaggttccacttgtaatcataccgttaaggatgaaagtttctgggtagatgacgccgcctgtcacaattactttagacggagagaaacgcataatggaagctacgttgatatcgtttgttatgacggttagtttggaacggtcttttaatgcggttgcgatgtgtccggttgttgttccggcgtcaagaatgattgtatcgccgtctttgaccattgtcgctgctaatgtggcaatgcgttgtttttcttcgtagcgcacttcgcttcgttttttccaattcggttcggaaactactttttcttctatcataactccgccgtgggttctttttagctttttgtctttttctaaagaggttaaatcgcggcgaatggttgcttcgtggacttcaaaatgtttggcaagttcgctaactgttgctatttttctactttttacatattggacgatggcacgctttcgttcgatagataacacttcttcccctccttttgtttaagtatatggtaactccaatagaagaaaatcgcaaacaaacaaaaaaccttggagcgattggccccaaggtttggaaatgaaaattaatcgtttaaacgtttttctagttctgcttttttgtcttcgaagcctggtttgccaagcaatgcgaacatgttggctttgtatgcttctacgcctggttggtcaaatggatttactccatttaggtaaccgctgatagctactgctttttcaaagaagtatactaggtagccgaaagtgtaagcatctagttctggtacttctacaacaaagtttggaacttcgccgtctgtatgtgctaaaagagttccttcgaatgcttttgtgttaacgaaatcaaccgtttcgccagcaagataattcaatccatctaaatctacgtcttctttattgatagttaagttgtggcgtggtttgtccactttaataactgtttcaaaaaggttacgacggccatcttggatatattgaccgatagaatgtaaatctgtggagaagttagcgctggatgggtaaataccttttttgtctttgccttcactttcgccgaataattgtttccaccactcgttaaagtattgcaagcctggctcatagctgattagaagttcagttactttgcctttacggtaaagaacgttacgagctgctgcatattggtatgcaatgttgtttttaagttctggtttatcgaaatctttgcttgctgctgctgctccgttcataagagcatcgatatcaacgccgctaactgcgattggaagtaaacctactgcagttaaaacggagaaacgtccgccaacgtcatctggaacaacaaatgtttcgtagccttcgttgtcggataatgtttttagagcgccttttgctttatcagttgtagcgtaaatgcgttttttcgcgccttcttcgccatattttttgattaaaagttctttgaacacacggaaagcgattgctggttctgttgttgttcctgatttagaaataacgttaacagagaagtcgcggtcgccaactacttcaataaggtcatgtaagtaggaagaactgatgctatttcccgcaaagaatacttgaggtgttttacgcgcacctttttcaagtacattatagaaggaatgatttaaagtttcgatagctgcacgtgctccaaggtaagaaccaccgattccgataacgattaatacatcggagtcgctgtggattttttctgtcgcttttttgatacgagcaaattcttctttgtcgtaatctgttggtaagttaatccaaccaagtgcgtcattaccagcacctgtaccattatgtaatgaatcatgagctgcttttactgctggttcaagataatcaagttcgcgttcttcaaaaaaacggagcgctttggaataatcaaatttaatatgtgtcattattttccctccaaattttaaaaaagtttctttactaactttatatcaaacagtgctttttagcaaggcttgaccttgtgaaatttgagcctttttgaaaatcaggtatagttttcatataagactccctcgcttctgactagttcatttaatgataattggtctacagctaataaatcatctgcgagcgggataggtatccactttactcgaaacacattgtcatcgttggaagcaagaagtgcattaccaacaggttttgcacgaaaaacgaatgtacaaacatgctcccatgtagcacggcgctctttgcagtgtaaaatagattctatttctatgtcaatattggtttgctctttcactttgcttgcaagcgcttcttccattgtttggtttgtttccacatgtccccctggaaatgcccatgtcaaattgcgatctctcaccactagtatctcgtctttcttttcgttatatacaaatgcctgcacatgaatagatcttttcacgtaaatcccccttttgactattttataatattgaataaatagaaaattactactaactattccctttttctaaaattttagtcaattaaatttatcagcttagcaatttatcccaaaatgggtatattgaatagctgattggggcttttatttgtctgcttttttaatccattcttctagtttatcgcgtaaagtgttaaaaccttcgtcgttttcgctagatgaaacttgtttctttttagttggttgttcttttggtgcttcttctgttgctctaatagaaagactgattttatttttttcttcatcaatatctagaattttcactttgacttcttggccaacttctagaaaatcatggatatctttgacaaaaccatgcgtgatttctgaaatatgaactaagccttgtgtcgaattatctagcgctacaaatgctccgtagctttgaattcctgcgactttcccagaaactacgtctcctactttgaatgtactcatcctcattccacctactttcaaccttacaatattttataaattataacacttaggcgaaactttaacaattattctaaatccttctatggtgagtttttaaggtggaatttatgctataattgaggcgaatgaaagagaaggagcgtgacataattgagtcaatttgatgaagtcattccgcgtattggaactaattcagaaaagtgggatggggcagaagaattatttggcagaaaagatattattccaatgtgggtagcggatatggatttccgtgcgccgaagcctgtacttgatgcatttcagcgtcaaatcgatcatgggatttttggttattcaacaaagtcaaaagcacttgttgaagctgttattgactggaacaaagagcagcatcagtttgaaatcgatccgagcacgctattttttaacggagcggttgttccgacaatctcgttagcgattcgttctctcaccaatgaaggggatgcggttttaatggtttcgccgatttatccgccatttttcaatgtaacgaaagccaccgaacgaaaagtggttatgtcgccacttatatatgagaaccgtcaatatcgaatggattttaatgatttggaaaaacggatgaaagaagaaaatgtaaaattattccttctatgtaatccacaaaatcctggtggacgttgtttcacaaaagaagaacttgtagagttagcgaaactatgtgagaaataccaaattccgattgtttcggatgaaattcatgctgatttagtgatgaaaaatcataaacatgtgccaatgatggtcgcagcaccgttttatcaagatcaaataattacactcatggctgctacaaaaacatttaacttggcagcgattaaagcttcctactatattattacgaataaagattaccaaacaagattcgctgcggagcaaaagtacgccacgactaacggtcttaatgtatttgggattgttggtacagaagcagcttatcgtcacggtgcgccttggttaaaagagttgaaagaatatatttatagcaattatgaatatgtaaaagcagaactcgaaaaagaagtaccagaagttggcgtgacggacttagaagcaacttacttaatgtggcttgattgccgcgcacttccaaaagacgaaaaaacgatttacactgatttaatcgaagctggtgtcggtgttcaaatgggttctggatttgggcattctggaaaaggctttgtacgttttaacatcgcctgcccaaaagaaactttagaaaaatccgtgaaacttctgattcaaggcttaaaaaaatagcttattttgagaaactaggtagcaaatacttagtttctttctttaggaaattgaatatagctttggtatactattctttggaaagtgaaatagtgttcattttccgtttacataaatttaaaggagttggtataaccgatgtttttagggcttcgtgaattagtttattctaagttgcgctatattttagtaacaggcattatggtcttaattatgttactatcacttattttatctgggctggcaaacgggttggcttatgataatgcttcatctgtcgcagataacggggttccatattatgttctcagcaaagacgcccaagacaaattatctcgatctcagttcccagaatccaaactcgctgacgtgaaaaaagatgcgaatgtaaaggatgctgcggttctcggtcaatctatgcaaacattaaaacgggaaagtgacgataaaaagtttagcgttgcacttttcggtattcaaccagatagctttctcgctccaaaaatttctgatggagctaacatacaagtgacaaaaccggacgaaattgtcgttgattcttccttgaaatcagatggaatcaaaattggcgatgttttgatggatgatattttaaatagagaattaactgttgttggctttacagaaaatcaaaagtacagccatgctccagttgtttatattaatatcgcaacttggcaagaaatcaaccctgttttatatcaccaaaagatcccgcaaacaagtactattgcgattaaaacagaaaatcctgataaaggtgtaacactcacggataaagatttaacgacaatcgatcacaaagagtttttaaatcaaattccaggttattccgcggaacaaatgacgcttaacatgatgattttcttcctaatcattattggtggatttattttaacagcattcttctatgtaatgacgcttcaaaaaacaacgcaatttggtattttgaaagcacttggaacgaaaacaagttacttagttaagagtattattactcaagtggtgattatttcgattattagtattttaattagtgtcggtgtaacgctgattttaccaagcatcatgcctgcagcgatgccatttagattaagtccgatgacgattgcactttatagtggcttgttcttcctagttgccctattcggcgcacttctatcacttagacgaatcgctaaagtagacgcactagatgctattcgaggaggtgatgaataatggaaactctactatcttttgagaaagtatataaagattacccgtctggtccttcaattattcatgcactgaaggaaaccaatttcgaagcgaaaaaaggcgaattaatcgcgattgttggtccgagtggttctggtaaaagtacgctcctttctcttgccggagcgctattaacacctactggcggaacaatttctattaacggcaaatcagtcgggaatctatcttccaaagaacaaacagcgctacgcttagaagaaatcggctttattttccaagcagctcatctggttccttacttacatgtaaaagatcaaattagctttattgggaaaatggctgggaaaagtgcggcggaacttgaaaaagatacagcttcgcttctaagccaacttggaattagcgatcgcgcgaatttctatccaaaagatttatctggcggtcaaaagcaacgtgtcgctattgctcgcgcgcttattaatcaaccctccgttattttagccgatgaaccaactgcgagtcttgatactgaaagaagtcgtgaagttgtcgagcttatccgtaatgaggttgtgcaaacgagtcgaacagcgattatggtaacacatgatgagcgtatgctagatttagtcaaccatgtgtatcgcatggaagacgggattcttacccaagaaagctaaaaaacctgcgtggcttaagtgccacacaggtttttttactgtttatttttggaaaccgttaattaaatctaatgcttggcctagtactttttcaccgttcatcgtaccatatgctgccatgtcgattacatctactggaattttcccagcagctagttcatcaactgtttttttctgataacgcacttgtggtcctaaaagcactacatctgcatcatcaattaagttacttacttcagcgatggagtatgcttcaatttcgcaagtttctccgcgttcttctgctgctttacgcatttttgttactaaaaggcttgttgacatccctgccgcacatactaaaacaatatttttcatcgtaatctttcctttcagattaaggctgctttttttgtacactcttattataactacctttagctttttaaacaagtaaactactggagccgagagaaaataattaaaaacacgaaaaaacattgcgatttcacggaaaaagagcgataatagacaataactttatccgaaaggtcagaaaatttcgcatcatccaaaaacaacgctttcggaagataaaaaattcagatcaggagtgtgttgcatgaaagtaattaaatttggcggaagctctttagcatcggggatccaattaaataaggttttccaacttgtagcggaggaccctgacagaaaaatcattgttgtttctgcaccaggtaaacgtttcaaggaagatacaaaggtgaccgatttacttattgattgtgcggcaaaggcacttcttggggaagatacgagcgaattgtttgaatctgtcattgcaagatatgcggggatagcactggacacagggatgagcgacgaaattatcaatcaaattcgcgcagatttacaagcgactatctcttcagataaaagcgatcctgataaatttttagatcgaatgaaagctagtggcgaagacaataacgcaaaattaatcgccgcctactttaaatttaaaggcttaaacgctaattatattaatccaaaagatgccggtttacttgtgacagatgaacatgctagcgcgcaagttttaccggaatcttatgatcgtttgtttgcacttcgagaaagagaaggtattattgttttcccaggatttttcggctatacaaaagacggcgaaattagcacgttttctagaagtggctctgatattactggagcgattgtggcaaacggcgcccaagccgagttatacgagaactttactgatgtggatgcagtctacgcagtcaatcccactattgtgaaaaatccgaagaaggtacttgagcttacttaccgggaaatgcgtgaactttcttatgctggtttctctgtttttcatgatgaagctttaattccggctttccatgcgggtattccggtgcatattaaaaatacgaacaatcctgattcttgtggtacgcgtgtcgttcatgaacgcgaaaataacaatgggccagtcgttggaattgctagtgatgacggcttttgtagcatttatattagtaaatatttgatgaaccgggaaattggcttcggacggaaagtgttgcaaattctggaagatgccgggttgaactatgaacatatgccgtctgggattgatgatttaacgattattattcgcgaaaatcagtttggcgaggatacagagcggacaattatgtctcgtttgaaagaagaattgaacgcagaccaagtgattatgcaacacgggatttcgctgattatggttgtcggtgagaccatgcgccataatgtcgggattacgtctcgtgcttccaaggccttatctgatgcgaaagtaaatattgaaatgattaatcaaggttcttctgaggtaagcattatgtttggcgtgaaagaagagcaagaaaacacagctgttcgcgcgctatataatgaattcttttcagaggtattcgtttaaaataaaacaagtttctcatcttaaccgacgagaaacttgttttatttatgagcttcctttaattggtaggtttttgctattacatcaataatgtaatcatacgtactaatccggtaatgcttgaaatcttggatgttgtagtcacttcttattttcactcgctcgtttattaaatctgactgctcgattatttcgaaattgctttggctggttaaccaactcgtactccatttacttttttcgtaggtgtcgagttcggttgatgaatagaaaataagtccgttaaaaaccatcttttgaagcttgctttcatcttcaaaatcaatttctatggttagtataagttggttggtgttttggtgtaagctttcgagccatgttttgtctctgccgtaaattagttggttgttgatttttattgggtgggatgtttccacggattcctcactcctagctgaaattattattaaacgctcactcgaaaaaagcactttcttaaaaccaagaaagtgctcttcattcattatttaatattaatcttctcaatcacaacgtcattcactggtttgtcttgcatgccagttggtaggttggcaatttcgtctactacgtccatgccttcgattacgtgaccgaaaactgtgtggcgtccgtctaaccacggtgtcccgccctgtttatatgcttcgataacttctactgggaagccagcttgttccatttggccaagcatgtcagcaggcatgtcgggtttttgaacgatgaagaattggctaccgtttgtgtttggaccggcgtttgccattgatagagctccgcgtaggttgaaagcttctgtagaaaattcgtcttcaaaagattcgccccaaatactttcgccaccagtaccgcggccgtctgggtcgccaccttggatcataaactcagggataacacgatggaaaataaggccatcgtagtagccatttttggaatgtgtaacaaagttttctactgtttttggagcaatttcagggaacaatttgatgcggatagttccgcgatttgtaatcatttctgcttcgatttcgttaggtgccacttcttttgataattgtgggtaagtcatattgtaaaaactccttcttttgttttaatttattgtttactaacgtagccaaataataagcaaattaacaacgacagcaatcagatacagtactagtataacagctgaaacccaaatgacaatttttttaaccaaaaatgcacatccttcactttatttttcattcgctatcttttattctataatgaaaaggacagttttaacaataatacgaatagagatgattcttttatgacaactcgaacacggaatttgtacatcttaatgctggcaaacctgttgatgtcagccagtatgacaatgattatgccttttctatctctctacattgaaacatttggtgattatagcaatgcttacgtgcaaagatgggctggttacatttttggcgtgacatttttaattgcctttatcttttcgccgatttggggtcgaattggtgataagcacggttataaaggaattttgattttaacttcggttggtttatccatttgtatttttttgatgggatttgcgcattctgtcacttacttactgattttacggatttttatgggggttgtaactggctttattggtgttagtaacgcatttattgcacggcaaactcctcgtaatgaagctggaaaagtcctcggtacactgcaactcggcggtgttactggtatgctatttggtccactgattggtggtgcgatggcggatttatttggctttaaagatacctttacgattactggtattgcgatgatggtggcggctttaattgtcgcttttggtgtaaaggaaattcgtacagaagaacaaaaagaagctgccaaagtggtttattcacgtcgtgcagttttaaaacaaatttttacgctgcgagttcttttcactgtgatggtcattacagcgcttatccaaattgcgaactttagtgttcaaccgttgcttgcgctttatgtaggagatatgacgcaatcagacaatattgctttcttgtctgggttggcgttttctgcgacgggattcgggaacttggtgatgacgcgaaaatggggacagcttggagacaaatatgggtatgagaaaatactgaatatcttgttgattatggcggctgtttttgttattccacaggcattcgcgacgaatctttgggtgtttatcttcttccgctttttattcgggattgcgattggtggtatggtgccatgtacgacagcttatattcggcttgcggcacctggtgttatgcaaggcgaaatgcttggctataatcaaagtgctcgctttttaggaaatgttatcggaccaattcttggcgggacgctcgctggtttcaccggaattccgagtgtattcttatttatgagttttatgttcctcgtggcatttttcattttgctttatgcgctacgttccgaccgaaaacggcatgtgaacgtagattgagtttgacaaatctaagttttttcttaggtttgttttttttgttcttcctattaaattgtttttttaatttcggtaaattgatttataaagttaagtttcctgcctttttttcagataaaaaagtatgttataataaaaaatataaaaagtacggcgtttatttgggtacttcgtgaatagtaaggttgttgaaatttgatgagttagcacggttttctaaaattttagttataactatgtttcattaaatgtaagtacttgcttaaaaaataatcatttcctgtttttattttcacatttccaggatgagtttccgtataaaaattcttcgaggaggagccgattttgtcatttcttcatctagcaattgttctgccatttattgtggcactgctaattccacttttttatcggtggacaaaacaagttcatactggctggttagtacttccgattccagtgattttgtttatttacttcttaacatttatcccaaaaacgatggaaggggcgacgattgtttcaatgccttggattccgcgacttgagattaattttacggtagtagtagatggccttagtttgctgtttgcgctacttattactgggattggctcactcgttaccttttactctatttattatttagggaaaaagaaagaacgacttagcaatttctatacatttttatttatttttatgacggcaatgcttggggttgtcttgagtgataacttgattgtgctgtatcttttctgggagcttacttcgattagttcattcttattgattgggtactggtatcatcgtgagcgttcacggtacggagctcgtaaatcgatgatgattacagtcttcggtggactaatgatgctcggcggttttattttacttcatattatgagcgattccttttccattcgtgaaattattagtaacgcggatgtaattagtaataatagtttattcattcccgcgatgattcttgtcttgcttggtgcgtttacgaaatccgcgcaagttccatttcatatttggctgccagatgcgatggaggcacctactcctgttagtgcctacctccactcagcgacgatggtcaaagccgggatttatatagtggctcgatttaccccactatttgcaagttcgggcgtctggttttggacggtatcactcgttgggattacgactcttttctggggttcacttaatgccacgaagaaaaatgatttaaaagcgattttggcttattcgacaattagtcaactcggcctcattatggcgcttcttggtgtcggtgccgcatcacttcactttgatacgctaagtgacgatatttatgtgatggccattgtagcggctgtatttcatctatttaatcacgcgacgtttaaaggtagcttgtttatgatggttgggattgtcgatcacgaaacaggcacgcgagatataagacgacttggtggtctaatgcgtatcatgccaattacggcgacgattgcatttatcggaacgttcgcaatggctgggattccgccgtttaatggatttctaagtaaagagatgttttttgaaagcatggtaaatattacgcaattgcaattgtttgatgcaagtacttggggcgttctgctcccagttgtagcttgggttgctagtgtgtttacgtttgtttatagtatgattattttctttaaaacatttactggaaaagtgaaaccgtacttacttccgaaaaaaccgcatgaagcgccattcggactccttttaccgccgattattttatctatatttgtggttgggattggtcttttccctaatttaattgcagagccaattttggaacctgctgtaagagcaatagttcctgggcttgctactgatttttcgattcatattagtttatggcatggatttacgccagccctattaatgacgtttggcgttgtggcggttgggattgtcttgttccttacacataaatactggaaaccttggattacaacccgtgttccaaaagcactgcgaattgggaaaacgtatgataatgggatgtattatttggaacaaggttcgtaccgaatgacaatgtttattatgactggttggctccggacttacttgaattacatgttatcggcctttattttgatgatggcttcggtcatgattttcacgcaagcacttgatttcaatttttcgagtatgacgaaagtgacggttgttgattttgttttagcggcagttattttagtgacattggttgggattgtcttttccaagtcgcggattacttcgattattttactgggagcgatgggttacacgattagtattttcttcgttatctccagagcgcctgatcttgctttaacgcagcttattattgaaactatttcagttgtgctttatctacttgtgttttatcaccttcctcagttcagtaatattgaggaaaagccgaaatggttatcaatgaagacatttttgagtatcggggttggtgtgattatcacgctcgtttccctttcagcgtataatacgacattttatgattcgatttcgaaatactatgtggataatgcttacgtggaagcggcgggacgaaatattgttaatgttatcttagttgatttccgtggctttgatacgatgttcgaaacggctgtactttcaattgcggcgattggtatttacgcgatgattaaattacgactgacgaaacgaggtgagaatgatgaaaacgaatgacgttctactgagaaatgtaacgaaagtagtagctttcattattttcttattctcactccatttattctttgcaggacattataatcctggtggcgggttcgtagctggacttacaacggctggtgcaattacattaacgctacttgcttatgatacaaaaacagttgctagtatgcttaatatcaatacgattatgcttactggagtgggacttgtattcgcccttggtactgggatgattgggattttcacaggagatcctttcttaacacataaatttggtcatgttgatttgccaattttaggagataccgcgttacacacggcgactttgtttgaccttggggtttacttagttgttgtcggtgtaacacttacgataattcaaacgattggggagagtgactgatggaactattaatgtctatattaatcggcttgatttttgcagctgctgtctacttaattctctctaaaagtttgttacgaattattattggaacggctgtcctaagccacggtgtcaatttgcttgtgcttacgatgggtggactgaaaaaaggtcgcgtgccaattcttggtacacctggagcgggaacgtataatgatccgcttccacaagcacttattttgactgcgattgttataagctttggtgtaactgcctttttccttgttcttgcttatagagcgtatcaggagcttgatagcgagagtgtatccaagacgagaggacatgaagccgatgatgaataatataattttaatgccgatattgatacctttccttggagcaattactttaatgctactgccaaaacgagtcatcgttcaacgcgtattcgcccttatttttagtggtatcttggttgtggcaacgattggacttgtattttatattcgagaaaatgggattacaactgtgaatattggtaactgggcggctccttttgggattacgatggttggcgatatgcttgctgtcctgcttacggcaacgacgagtattgttttattctgcgtgattctttattctttttatacgattgggaaaccgcgggagaaatttctttattatccagcgattctctttatgatcgttggggttaatggttcatttttaactggtgatatttttaatatgtttgtgttctttgaagttatgctgatggcatcttatgtgttgcttgtcattggtgggacacaggttcaacttaaagcaacgataaaatatttactgattaatgtcgttggttccggatttttcgttgtagcaattgcgctactttattcgatgattggaacgctcaacatggcggatatttcgcaaaaaatcacggacttaaatggtgcaaatactggaatgattagcattgtcgcggttctgttcttgtttgtattcggattgaaagcagggttattcccgctttacttctggcttccaggttcctactttgctccaccaattccggtgcttgctttgtttggtggacttctgacaaaagttggggtttatgcgattatccggacatacacactatttttcagttcgttaacagattttgttgttccactacttggaattcttgcaattgtgacgattattcttggggttattggggcaattagttactatgatatgaaaacgattgtgatttataatattatgattgcgattggtgttattctgtttagcgtttcgatcatgacacgcgaatcgatgactggtgctgtgttttacttaattcacgatatgattatcaaagccgccctcttccttattgttgggattgtgatggcgattacgggatactctagcgtgaaaaaattcagcgggttgatgagcgtgaagccttcgctcggttggattttcttcattgctactcttggccttgcaggaattccaccacttagcggatttatcggaaaactgctgattgttgaaggagcattctcagctggtcaaatggtcggcgggatcatcattttactatccagtttattcgtccttatgtctttaatcaaagtctttacaaaaggcttttggggcgagaaaaaaggcgtattcaatttacagattccgtataaaaaaatgcttgtgccagtagttattctacttgcgatttcgattggttatggtgtgtttagtaacgcaatttatccgtttattgaacaggcggttgacccacttgttgacccttctgtttatatccatgcggtgataaaggagtgataaaagatggcttttcaacttattcttaatataatacttgcttgtttgtggatgtttttggagtcatcgtttagctttgcaacatttatcattggctttatcatcgggattttcttgctattctttatgcgacggttcctaggatcgagattttatctttttcggttattcgctcttgtcaaactggttttccgttttttacatgatttaattgtttctacggtgcatgtaagtcggattgtattaaagaaagatatgaacattcgaccagggattttcagatatgatacaacgcttgagacagactgggaagtgacgatgctcgcattactgattacactaacacccggtacgctttcgattgatatttcggacgactataaagcaatctatgttcactcccttcacgttccaaatattgaagaagaaattgcgacgattcgtaagtcttatgaaggcgcgattatggaggtgttccacggatgattattcaaatcgctttatccattggtttacttctctattcgatttcgactttcttatatctttaccgtattttaaaaggacctactacttctgacaaagtggtggcgctggattctatcggaatgaacttagtggcaattgttgcgcttctttcgatgttttacgatacgcatgcctttttggatgttattttactcattgcgctccttgcatttatcggaacggtttcctttgccaaatttattgagaaaggaaaggtgattgaccgtgaacgtgataattgagattattatttctattatgattataattggtggtttgcttagtattcttgccgcaatcggggttatccgcttgcctgacgtatatacaagaacacacgctgccgggattagtaatacatttggcgttagcttacttctgttcgcaacggttggttactttttccactcaggcgaaggttttaatgcgcgagtacttctggccgtattgtttattttcttaactacaccagtggcttctcaccttattaaccgggctgcttatgataccggtgttccactagctattcgaattcgtgaccaattgcgttcggtgaaaaaagacgatatcaagaaaaagaaaagtcttattatccgacaagaacaaattgaaaaagcacgacaagaacgggaagaattggaagaacgaatggaatgggaacgacgcgaagaaaaaattgatgagcgcgaagatcaggaagaacaagaacgtgaacgcgaggaacaaacgattgaagaacagtcggatgattctgagcatgaaatcatcgagcaagatgaaagtgaaaccgaatcagacgatgataaatcggaaaaataaaaaaagcatggcgagatttaatctctgccatgcttattattttcgcttctttttaactgcaatggtacatctactaatacaaagtaacttctcagtttcatcagtaatctttatttcccaaacttgggtacttttaccaatatggattgcctctgcggttgctgtcaccaatccggcttgttttgatgctaagtgattggcattaatttctaaaccaaagacgatttcatcgggttcgattgatttggcagcaccaatacttgctgcatgttccgctaaaacaacagaaaccccaccatgcaaatagccaaatggttgatggactttttctgtcacttctaattgaacaacggctttccctttttctactgaaacaatttcaataccaatagtttcttgaagtcccatatattcccttctctccgaatttgatttatactttattatataagagttggaagaaaaattctagaataggtttttaataagctcattgtggtaaaataagaatagactttttgacaggagagatttgatgtcgatatttacgaatacaccattaattgcatctattattgcgatagtgtttgcccaagtggtcaaagttccgattcatattttagtataccggaagtttaacctcggattaatgttttccaccggtggtatgcccagctctcactcggctgcggttactgccttaatgactacacttgccattgaatacgggttagattcaccttatttcgcgatttctgttgtatttggtattatcgtgatgttcgatgcgactggcgttagaagacaagccggtgaacaagcagttgttttaaacaaattagtaacggatttccaagacttcgtggaacatgcaaaaggacttgctgctcctgaacaagaagaaaaaacgaagcatttaaaagaattacttggtcataaacctatggaagttttcttcggagcacttaccgggattgcgattggatttattttagaaatgtttatgtaaataaaaagttgactatttgtagtcaactttttttgtttgtcgttagtttacagctatatcttaaagggaaaatcatgatatcaacggattttaaaaaggggctgacttcggtgaaaaaggtaacactcatttttagcgtttatacatttattctaggtatcttagtgggagttattgctgctttatttttagcaatggttcactttgccacgacatttttgtgggattatcttcctaatcagtttgatttttcatggtattatcctctgctaatcggcttaatcgggagtttttttgtagggatggttcagctgaaacttggtgactatccgcggtcaatgcatgataatgttgctgaggcgaagaaaactggacggatggaatatcgcaaagttctgcttccaacaatacttagcgcttggattattttaacatttggggcgagcgttggtccggaagcggctttaattggtatcgtaggtggtgccacgacttggattattgaccatttaaaattatctatggcgcataaagaagaacttgttagtttgagtgttggcgcgattatttccagtattttccacgctccgtttagcggactagccgaggaaattgatgaaagtagtcaagcaaagaaaattcctaaaaactctaaattagtgttatcacttcttatttcttttagcgcactcggatctttcctttggctgaaatcctttttaaaaatgcctgcaagtatttttgcgattcggctacctgatatgggttggtcttggtggtttattttactttttatcccaacaattattctcggatggctttttagtgtttattttcagcaattacaagtatacattgcgaaagcggcctctgtaattaaaaataaaatggtcgcggcgattatcggtggattaagtattggtttgtttgggattatttcttccttcatgttgttttccggcgaacatcagttgatcgaattaacaactactgtccaaaattattcgattcccttcttattaattattgcgctcttaaagcctgttttagtcgctatctgtttagcaactggttggaatggtggtgcgatttttccggcgattttcactagtactgtgatgggatacatagcaacatattggatagatgggtcaactggatttctcattacggttttcgtaaccgcctgttgtacgaaaattgtgggaaagcctgttctaaccgcatccattttacttttcattttcccgctacaatttttcccgtttattctactgacagcctttatcgttaataaaaattggtgggttagcattagaaaaattatccgggcataaaaaaagcagaaattccccaagaatttctgctttttttcacgaacaatcccagttatacataatattggaaaagtctcgattgattagatcttgtttatttataaagaagttcccgacaccgcagtcgccccacataattgccattctgttctcatcaaaatcctcagatgctaattgaaacaaaagcgtgtcatgatgcgggttttctgtatacatacgcggatcttcttgtgtaaaaaaaggataccccccaatttgactacattctttaccaatttgatatagtgcttcagatttatcttcatcttccgcgaaaatttggtcagccagctcataaaaattacttccaaattcattttcaaaatcaaagctatcttgtaatagaatttgatctgaaacttgcccagctattttaaattcaccatttacaacggggtaaaagtccgttttcgctacatcttcaaaaaatgcatcttgttcttcggcagttaagctctcacttcccaagtcatcgaagaaaaacacccgaaaaccttcttggctcgttggattttcaaaattaagtccatacaaatcatcttgataatccacataaaaagcaagcaatccaaattctggataattttccatttgcggcatttccgaaaaattaatttgtgttaataaggacagtggcttaccttcttcggtcactggatagccttgctcttttggtaagtaaccacgcccaccagctttactttgcaacaatgaaagcttaccagcatccttaaaatgtagctccatccgctctttctccgtttctaaaaaacgttcggcccattcacttggaagtatatcaaaaagttgttccatgatttaccttctttctttttttctaattataacatgaaaaaagcgccatatctgacaaaagcagatacagcgcttcttgagtttttatttatagaatttgaatttacctttacttgccaagacgcctgaaccaccaataagtagtagggcacggtcatcaataactttcttcataacggaagctggatagcctttcaagtttttaccgaaaacgacaccaattgcatcgttatcgcctagagagcataccgttcctttttcatgataaacaaagtcttgtaggtccgtttcgcctttaactaatttagctaagttcactgcagccacatctgcttgttgcattgcaatttgggcagttggcgggaatggacggtcgtttgctgggttgatgattagtgagcagtcaccaacaattaaaatttcctcgttacctggaacggttaaattgttgtttactttcacacgaccacggccagcttcaaaaccagatgcttcgataacgctattgccacgaacaccggcagcccaaataatcgttgctgctttgatttcacgaacttcattttcactttcggcatattttacgccgtcagctgtagcctctttgactggtttaccgacatggaattctacgccgcgatcttccagtacaccaacaccataatcaacgagtttcgcatcaaattgtggtaatacttttggagctgcttccatacagtaaatgcgaactttttcgcgtggtacatcatattgtttcactaattctggaatacgattagttaattccccaagaaactcaattccagtaaaaccagcgccaccaacgataattgttaataattcatcgcgtgggtctgttttccatttagcaaattgcgcttcaatgtgcgcacggatttttttaacggattctacacttgtaatagtgaaggcatattctttcaaaccactgattccaaatgtttctgcttctgacccaagagcaattaataaatagtcatagctgatatcgccatttgcatctagtgtgactgttttttcatctttattaatttttactactgtatcttggataaatgtcgttttcgtatcgttaacgactttgtctaatggatacattaatttttctggttcaattgttccagctgctgcttcatgtaaccaagtcgtttcgtggtgatagtcattcttattcactagaacgatttcggcttccaagtttctttgttgtaacttacgtaaagtttttagtcccccgtatcctgctccgagaatgacaatttttggtttactcatctgttatcacatctactttcccttatatttttcttcacaaaaaaaattgcattaagaatttcttactgcacctatgtagattgcgctaaaaatctactgcaaacaatgaataaagtgaaaatggtaagtaccaatatattccctatttcacagcttacaaactatatcatagactttttaacattcattttcaagaaagcgaactcaagggtttaagcttctttggagcatggttcgagtggtatacgatttttttcacaataaagctttgagacgacttggttttcataaaaatcttttatttgaaacgtaattggtctagttcattttttccatattttaatgaagacaatcccgtaaacattctttttcaacaatatatgctaaaatatgcttattgcaactttagcgatttcatagggaaattaggaactagggggtgatgtattttggatgaaaaaacaaaaatttatgatatcacgatcattggtggtggaccggttgggctatttgctgcattttatgccggcatgcgcaatgcgagtgtgaaaataatagaaagtttaccgcaattaggtggacaactttccacgctttatcctgagaaatatatttatgatattccaggctatccttctgttcgcgcacaggaacttgttaataatttgattcagcaaatgaaaccatttgatccgaccgttgcactggaggaagctgttcaaagcgtggaaaaacaagtcgacggcacatttgaaatcatcacgaagaaagatacacattacagtaaggcaatcattattactgctggaaatggcgcattcgaaccaagacgtcttgaccttccagaagcagaacaatacgaaggaacaaacattcattacttcattaacgatctgagtcgtttttcaggtcgccgcgttgcagtttgtggtggtggggattctgcggttgactgggcactcatgcttgaaaaagtcgcaagttcagtcgcaattgttcatcgccgtaatgcgttccgtgcgcacgagcatagcgtgaataatttggaaaaatcatctatcgcgattaaaacaccatttatcccaaccgaagtgctcggtaacggcgataaattaacccatattactttgcaagaagtcaaaggtgatactaccgaaacgctagagattgacgatttcatcattaattatggcttcgtttcctcgcttggtccgattaaaaattggggtttagagctagaacgcaattcgattgtcgtcaattcaaaaatggaaacgagtatcccaggaatttattgtgcaggtgatatttgcacatatgacggtaaagtaaaactaattgcaacaggattcggtgaagcaccaactgccgtcaataatgcaatgaatttcattgatccaaaaacacgcgtgcaaccaatgcactccacatctttattcgaataacaaccgaaaccacgaggcgacttgtggttttattttttactcaccgggaaaagttctttgtagatattttttaggaggagattagcaatgaatgtactcgtaattggcgcaaatggcaaaatcggccgtcttttagtcgaaaaacttgcaatggaaaaaggcttcttcgtccgagcaatggttagaaaagccgagcaagtgagcgaacttgaaaaacttggtgcaaagccgattatcgctgatttaaaaaaagatttccactatgcctatgatgaaattgaagcggttattttcacagcaggctctgggggtcacacgcctgcttccgaaactgttaacattgatcaaaacggagccatcaaagcaatcgaaactgccaaagaaaaaggtgtacgacgatttatcattgttagctcttacggcgccgacaatccagaaaatggtcccgaatctctcgcccattatttaaaagccaaacaagcagccgatgaagaactaaaaaaaagtggtctcgactacaccattgtccgcccagttggcctctcagatgatccagccactggcaaaatcgctgaagtttccggaaaacctaaaacgaatattcctcgagcagatgttgcagattttattagtgaagctttatccgaaaaatcaagtttctataaaacctacaccatcgaaagtggcgacacaccaatcaagcaattttttaactaataaaaagcgatgagctcgtaatctggctcatcgcttttttctatattaaaacggattttcttccaaaaatgtatatatattcgcaactaattcctctgctgtttctccgcgaaccacttccccgtccactaaagcaaacaaacttgtcgcacataaatcacaatatgtcagacaatcatattcaatcacgtctaaattatcatccgcgtctagtttcgcaaatgcagcatctgccccactcgctaaattattcacgcaaaattccacaatcggattcatttccccttgcctcctagactgttacattgttgccaagtaaccacggtcggtcattacttgataaatatctttcaaccgaggattgccttccgcgataatttcaccgtcaaccacaatgactgggtacatataatcttcttcgacaattttattcgccatatccgctaaagccgtttcatttggcggattaaaaatatccacatactccaccacaaacggttgcccagaaaacttccgaccaatcgcagctcgaagccattcctctgtttccttcgaggatggcgctccgacacaactcgcacaaatagtcgttgaaccataaacatataatttcgcttcatttaccatcacgcttcacctcattatcattgtacaaaaacccactggaaaaagcgactaagctgtttcacgaagcataactattaaactttatgaatttttataaagatatgaattgacacaaatttacagatatattataatatttccaatacattgctaatctttaaagcagtagtgtattaatatgataaaccgcctcaaggttgtacccgtgatttcacggtcaacatataagtaacactccctttaacaattgggcgcgcaacccaattgtctttcaaccttaccagttgaaagagcacgttcctttctgagccttaggaacgtgtttttatttgggccgttcgaagtgtaacgagttacggcccaaatatgcatgcgagcaaagcgagcatgtaatccttcctgtaaagtgcgcccaccacacaaactatcatcctccatcaaaatccatccaccatctatcgaaaacccgcattcccattcgcccgttcgaagtgtaacgagttacggcccaaatatgcatgcgagcaaagcgagcatgtaatccttcctgtaaagtgcgcccaccacacaaactatcatcctccaccaaaatccatccaccatctatcgaaaatccgcattcccattcgcccgttcgaagtgtaacgagttacggcccaaatatgcatgcgagcaaagcgaacatgtaatccttcctgtaaaatgtgcccaccacacaaactatcattctccatcaaaatccatccaccatctatcgaaaacccgcattcccattcgcccattcgaagcaaagtaagttacgggccaaatatacatacaagcagagcaatcatgtaaaccttccagtaacctacatccataaaaaaacacccacttttctttatacattatatatatccctagaaaagcgaccaacccctacaaccacctaacacaacaccctacaataccaccaaaaacaatatggcgaaattgcaacaaaagtcaaaacctgctcagaataccaccaaaaagacatgttttcgaaacattttctctgatacaattacattgctttcagacgtaatcaccaaatttccaactataaagaatgcgtccaacaactaaggaggaaacgaaacatatgtataaacttgtcaaaataattttagctttattcttaataactacagtattcttaccatttagtaatgtaaaggcagcaccaacagatgtagtaaatatacctgatccggtgttaaattcaggactaaaaaacatcataggaaatcctttcttagatgagataaccgaggcaaatatggcgactattactgtcgcagatctttccaatatgtcaggagcaccggggtatccagttaccggcctaattaaagatttaacaggactagataaagccgttaatatgaccaaattatatttttccaatcaatcacaaattaaaaatctagataaaattaaaaatttacccaatttgaaaaaaatcgtagcagtaacaacgggattgaataatatttcagctcttggagaaatgccggcgttagaagaagtagaactcggcggtgattatattaccgattttacaccattacttgaaaaggaaaatttaacatcattctcttacaactcttacgcatggtccaatcctgcataccatcaaattaataatgatgaatttaaaaattttacaaaacttaaatcgttagtaaaactagatttaacttggaataatattaccgatttatcacctttaacagaaaatgatcatattactaacttaaatttaaattataaccagtttactaatgtcgcccctattgctaccatgaaaaatttaaaagtactttatttgaacaacaataatttaacttccatcgatgcattgaacacactaagaggcttaacaattgcttatgcagataacaataatattaccgacttgagtaacttgaaaaacttctttgaagcaatggttgcccaaggagattatgaaggactgcaaattaataaccaaactatcacacttccgacaataaatataaaaaaaggagcaacagcaaattcaactaaccccactttagatattaatggtcaaaaaatgcctgtttccaatatttctaatgatggaacagtctctgctgataacaaaaccgtttcttttgcaaatctacctataggaaataagactgtcacttacaaagccaaatttacagcaacttcttctaaaggtgtccctctcagctattctatcaatgtgtcacaaccaataaatgtttctgaacaaacagattcaacagtgagtgtattttaccaagatgaaaacggcaatgaattagctcccaccgaaacactctcaggcaaatctggggaggattatcaaactaccgaaaaaacaatagccaactatcagttaaaagaaattgaaggacaagcttctggtcaattcaccgacaccgattcaactgttacctatgtttatgaaaaagcagatggcgctcccgttactgtgaaatacgtcgacgcggacggcaacgatttagctacttccgacacactgaacggcaaaattgatgcaccttatcaaacttccgccaaaagtctttccggttggacagttaaaactacacctaataacgcaactggcgtatttaccaatagtaaacaaaccgttacgtacgtttacgaaaaagcagatggcgctcccgttactgtgaaatacgtcgatggagatggcaacgaattagctacttccgacacgcttaacggcaaaattgatgcaccttatcaaactacagccaaaagtctttccggttggacagttaaaactacacctaataacgcaactggcgtatttaccaatagtaaacaaaccgttacgtacgtttacgaaaaagcagatggcgcgcctgttaccgtgaaatacgtcgacgcggacggcaacgaattagctacttccgacacgcttaacggcaaaattgatgcaccttatcaaactacagccaaaagtctttccggttggacagttaaaactacacctaataacgcaactggcgtatttaccaatagtaaacaaaccgttacgtacgtttacgaaaaagcagatggtgctcccgttactgtgaaatacgtcgacgcggacggcaacgaattagctacttccgacacactgaacggcaaaatcgacgcaccttatcaaactacagccgaaagtctttccggttggacagttaaaactacacctaataacgcaactggcgtatttaccaatagtaaacaaaccgttacgtacgtttacgaaaaagcagatggcgctcccgttactgtgaaatacgtcgatggagatggcaacgaattagctacttccgacacactgaacggcaaaatcgacgcaccttatcaaactacagccaaaagtctttccggttggacagttaaaactacacctaataacgcaactggcgtatttaccaatagtaaacaaaccgttacgtacgtttacgaaaaagcagatggcgcgcctgttactgtgaaatacgtcgacgcggacggcaacgaattagctactccagatacattgaacggtaagctagatacatcttacgcggtaacagctaaaaacttgagtggttggaagttaacagctactccatccaacgctaatggcgtatttacaactgatgctcaaacagtaacctttgtatacgctaaacaagaagacgatcctaaaaaagatgataaaacaccaaataatacaaaaccagatacaaacaaaacacctattaaaatcaatgaaaacaaaccaacagcaagcaaagtaactacaatcaaaagacaaacaaaattaccgaaaaccggcgatactcaacaagatagtatattgttcggattagttggtacatgtttcgttctcttaggaatttactctatctctaagaaaaacagctaaaataaactgctaaaactctcttatcaattggataagagagttttagtttggtaattacttcaaattgcactactttcgacctcagaaaaacccaatttaatttctttaaatttccccatatcctgttataatagagaatatgataatgcctcacgaaaggagaactatgtcctatggaagaaattagctacgccgaagttgataaagctttaaaaaagttccgtccgtttttagttcgtgatggcggggactatgaacttattgaagtcacacaagacggaatcgtaaaaattaaactactaggtgcatgcgagacttgccccagttctgatatgactttaaaaatgggtatcgaattaactttagcagaaaaaattatcggttttaaagaagttgttcaggttttttaaaacaaatattttagcgaccaaacaatcggtcgctatttttgtataaaaatgtttagaaatcctgtaaacgtctatcatacaatatacatacagttagaaggaggtaagaaaaatggtagaaaaacaaagtgccttagaatcaaaagcgcgtagttggctaatcgaacgcggcgtagaaattgacgatatcgctgaacttgtattatttttacaacaaaaatatcaccctggattggaattagaaatttgccgtcaaaacgttgagcatgttcttcgcaagcgtgaagttcaaaatgcagttttaacaggcatacagcttgatgtgatggctgaaaaaggggaactcgtccaaccactacaaaatatcattagcgctgatgaggggctgtacggcgtcgatgagatactcgcgctctccatcgtcaatgtgtacggatctattggatttaccaattacggttatatcgataaagtaaaaccaggcattcttgcaaaactaaatgaacacgatggtatcgccgttcacacattccttgatgacattgtcggcgccatcgctgcggccgctgccagtcgtcttgcgcatagttatcacgacgacatcgttaattaaacaaaaaccagtaaaacaagaggcttattcctccaattttactggtttttcttttcctaattttacttctacttgccgaatcgagtttttattcattgaacgaacgataaagcggtatccctcatgttcaatctcatcaccagcttctaagtcaaaacgttcgagcagcatccatcctgataacgtatgaacacccggtccttcaatcggaacaccaagcgcttcctcgacttcaaggagcggctcagatccttcaataatataatgattcaaagctacttttcgaatccctttcggaccttttgcttcttccatatcaccaacaattacttccatgacatcttctagcgtcacaatacccgaagtcccgccgtattcgtccgtgagaacgacaaatggttcactttcttgctgcattttcacaagtaactcttccaaaatcatgccttcaaacacttctaaaacaggcgtaataaatggttgaatagattgcgtcacaatcgtttcatcttttccaagtccagccatcaccgcactgactcgtagcattccgataatatgatccttatcttcatcttcggttactggaaaaatatgatatgtatgttcagaagttaatttcaataaatctcgtacggtcgccgtttgatcaatcgcaatcatcgacattcgcggtatcatcacttctttcgctggtacgtcgcccagtttgaaaatatttttcatatagcgaaactcttgtggattcaaaagtccttgtctatagctatcttcaaaaataatcttcagttcggtcggtgtcatttgatccgcatcaaccgtttgctttacgccaaacatccgcgtgattaaattcgccgagttatttaatagccaattgagtggaaaagtcaggcggtaccaataaacaagcgggcgcgcgataaacagcgctactttttctgtactttgaattgtaaatgttttcggtgcaagttccccaagtaccacatttaagaacgtaattaaaataaacgaaacaaaaatagaaatcggcttttcaactgattctggcactggcaacattaagaataatggctccaaccaaccacgcattgtcgcttcaccaacccaccccatagcaagcgcggcgagtgtattacctaactgacaggcagccaaataatcattcatattcgaagtaactttttttacatatttcgctcgcgggtcctctgaggctactagttgcaggacagtaggtttccggattgcgacaatggcaaattcacttgccacgaaaaaggcagtcgctgcaattaaaaatatcacaaagaaatcattaaaaacgtccatttagcatcctccttctccccattctatacccgttcttagcgtttaaaccacaagtccgccactgcctcaccgtcgataatttcacctgttttctcaaaaccatattttgcataaaatttttccgctacaatattatcaggttcataagataaacgtagtcgtgctggctgttctggtaaatttttcaccatctcaataatttgctctagcgcatccccgccgtagcctttaccttgatgctctttccctgtcataaaccgtactagccaaaattctccatcatctgtatccataccgtacattgcgtagccaaccggcatattatccgcgtatattacaagcgaatgatacgtttcttcaaaacttgcttcgataatggaataccagttttctgcgacaaatgttttttggtgcgggtgtacttctaacttcgctgtttcatgaaaattgtcttttgttacttttcgaattgagaccattttctaacctcctatttattaaaaaaagagcagaaaaattccgctcttctagttaaattcccaatcagttagttttgttacagcgtatgtaggctggatttcttttgttaataatgcttcttttgatgtaaagccagtgtgtacgattaacgtatccatgccgtaattgattcccgccataatatcggtttcgtagttgtctcccaccatgattgcttcatctttatggacaccgagttttgcaagtgcttgctccataataatggattcaggctttccaataaatattggtgctgtttctgtggctacggaaacgactgatgtgatcgaaccatttcccggaagcaaaccgcgctctgtcggaattgccgcatcgccattcgtcgaaataaacatcgctccaccgcgaactgcaagagctgcctttgaaaatttctcataatcgacttcccggtcaagcccaacgacaacaaaagctggattactagaagttatttcaaatccattatctgttagttcttgttttattccacgttcaccaataacataaaccgttttttcgcgtttttgttccatcataaattgcacggttgcttgtgacgtcgtgaatacatcgtcacttacagcttgaatccccatgtcagttaaatgttctgctacttgcccaggtgtttttgttgaattgtttgttacaaataaatacggaagccccgcacgttttaagttttcgataaaaatgatcgcctcaggaataacttctgctccgcgatacatcgtgccatctaaatcaattaaatacgctttataattcttcaattccaaactacctcatttactattttacttttttaataacaaaatacgcacaaccaaaattgcagtattcataaatatattcttttaacgtgctaattttgttgtcgtatgcggctttgcggttatcgtcttcgaaaaagcctttcagccgaagttgatcgtaaccccagtcgcccactatataatcatatcgtccaagaatatcgctaaaccgttcatttaacttctcctcgtcaaaagcatcgcgataattggtgataatctcgtagtttaaatcttgaatcgtaatcgtcacttgtcttcctcctgtccgtacatttttttgagtttccattttaaaatatctcggagtagttccggtgtatatacttcttttcgtttaatttgttttacaatcgggaaaaatggcgcgaacacaaacgtatcatgcgtcgcaatccggtattccctcgttttatcaattggtttattatcaaaaagtgccacttgattttccgcatcaaaaccagctcgttccatcaaaacagtcccaaaatactcgccacggaaaccaaaacctcgaagcggaatatcttgcagttctgctttctttcggtagattccgtctataagtatttcaagctcctcaccagacatcgttaaagcaatcgcgttgagcggatgcggtaacatttggtggatatcaaaatccgtcacgattcccgcttcaaagtctgtcataaaaattccagcgttcatcacaaacgtttctgccccagtccattcacaaaccgcttcattcaaaatgtgcgcaatttccgagtcatcaaaccaattatgcgctaactttccgggaatcgcaactactttttcagagagttctgcgcgccctttatcgaagaaaccttgaatttcattcgcttcatttggagcagccggtaaatcctctgttttaaaagtcatggcggttttagtcagtatctgattattttcatctaactctatatccactttcccgatatattcaccccatctacctgctgcagcaagtaatgcattcccttctattttccccgtttcaagtaaatggtgcgtgtgtccgcccaaaattacatctacttcaggaatttcgagtgcaatgcgttcatcgcttggtaaacctagatggctgagcaaaataactacatccgtatcttcatctaagccagcaacttgctttttaatcgagctaattggttcttctattccccagcccatttcttcgtagtaatcccgaaacggcgccgtcgcaccaataatagctattttcacttgctctatttctttataaacaattgatttcacccagtccggctgctccgtgcactctttattcgtgtaaaaattacagcacactactgggaagaccgcatgttcatataatttgtccagatcttcatgagccaaagtcgttccttcattattgccaaaagtcaccacatcatacggcagttggttaagtaagtccgtattcgcaagcccgttcgttccttcagtaagcggatggacccggtccaaaaaatcaccaatatcaaaaaagagcgccgactgattttctttatctgcagccgttcttttctcttttaagaaattaaaaatgcgtggccaatgttccaagtgactatgaacatcatttgtatgccataaagttaaatgtttcatcaatccatctcactccctacttataactattgtagcgtaaaacagtgttttttacacgcgctaggactggatgaattgttcccttttcattttatgttatgataggatatattgttttaaaagggaagtgatttttttggatattacgcaaacagtcgaaattcttttaatctctgtttttgcaggggttgtaggctctttgcttgggcttggtggtggaattatcgtgacgcctgccttgacacttattttcggaattgatattcaatatgcgattggtgcaagtattatttccgttatcgctacaagtagtggctccgcaattgcttatatcaaagacggcattacgaaccttcgtgtcgggatgtttctcgaaattgccacaacaattggtgcaatcaccggggctttcgtcagcggactgctctcggccacggcactctacatcatcttcggacttttacttctttattctgctttcaacatgattaaaaaggtcggtacagaatttcctaccaatgtgaaaccagacccactcgcaaccaaactaaacttacatgattcatattacgataaatctttacggcagacagttgattatcaagtggcaaacgtccctgctggttttggtgtgatgtacggcgccggaatcgctagtggcttacttggaatcggtagtggcgcatttaaagtaatggcactcgatgtctttatgaaaatgccgcttaaagtaagtagcgcaacgagtaatttaatgatgggcgtaaccgcggcggccagtgcaaccgtgtatctttttcaaggtgacatccagcccgctattgcggctccggttgcgattggcgtacttgtcggcgcaacacttggaacacgcatcatgcaacgtttaaaaagcaaagttattcggattatttttattcccgtcattttatatgttgccttccaaatgattttagaaggattggggtggatttaaatggcagagaaaaaagaagaaatgtaccgggtcgagctaattgtcagcgcactgttacgaatcggtgttgtcctcagtgcaatcattatcgttttcggacttgttatgctatttatcaccggcgaaagtggctacccaggggaaacttacccgacatcacttacggcgattttcagcgggctaggaacgcttaaaccctacgcgattatgatgtttggcctcttttgcttaattttaacgccagttcttcgtgtcgttgtatcattatttacttttttgaaggaaaaagattatttgtacgttgggataactgggattgtattaattattttagttattagctttttaattggaataaaagcataaaaaagatggcgctagcgatgcgccatctttttttattccgaaaataaatccatttgcatcggagccaagccttgaaactcgacttggagtgccttttgtaaatgtttcgcattatcagccgcatccccgccgctgttattattaaaaatcacgacaacttctttggacaacttttgcaaatgttccacgtatttagcccattcgttaatttcctcttcattgtaacggtaaagcgtgcgaacctcgcgccactcgggactgttagctttcatccagccatactgatttcgaccgtgaagccttactaatgtcatatcactattcgtctcgcgaagcacaatcggcacactgcccgccccgacttgcggctcatcgacaactgtatgaataaagcctaattcgcgcaacaaatccagcgtcttttcggtattttgctcgttataccaagaattatgacgaaactcaaccgccactggcaaatcgcccattttcgacgcaatatattttaaataagtcacgttttctttcgtacaattaaaatacggcggaaattgaaataaaattgcctgtagtttccccgtttcacttatcggtgcaatcatatccatataagccgtatacatcgcattttcactatcaaaatactgcgaccattccttatgtttcgtcatcgccgaaaaggccttaatcacaaaccgaaaatcatccggagtttgcgccgcccagtttgccgttgttcgcggagaaggaatcgcataaaaactcgtatcaacctccaccacaggaaaatgtgccgcataatcagccaatgttaatttttttgtttgtaataaagaatcatgatcactccacccagttaacccgattgttaccatcaactgccaccctctctatcgttatgatttatgtttattataacgcaaaaaggagggagaagcctttaatttggtcctcgcttttacttcgaaacaaaacaaaaacttcaactgtctagcagttgaagtctttatcatatattaccactcgcgctctctaagtagttcttcaatatcgatatctatcttataatgagctaaaatcgggatgattgtttcagcaatcgaatcccttgctcctgtttctaattcgctctcattttcataaaactcatcttgcaacgcattaattgctaatgtcatttcatcaaatttagcttgaatcgcttctgtatcatgattcccttgttctaaaaattgaaccgtatcgaacatatattgctttaatttatccactagaaacgtcggaaagaatgaatcttgatacattccctctaagtatttaatttctgccataattatcagtcctttgctaagttgttgagaatattgtatcattttttttatgaaaaatcatgaccaatttgttgtctacttttatttgttaaataagttcaatagtaaaatcgaaatattgctctaaaaaatgattttttgtctatctacttttttaataatcctatagggcatctaattagcaatctcttatcaccatatattgaaaacaaactaataacatgggttctcaattaataaaggacttttttgtatgccctataaatagattattctaatagatattttttataaaagtacaataaattgatgatatattataaaatacgtaaaggtacctttacatatattcatacatcgtatataataaatgtaaaggtacctttacttgaggtgatataatgtggttgttacaaatatagttaaaattataagagaaaagaaaggtattactcaaaatgaattagctcattcattagatgtttcacgccaaacaattcatgccattgaaaagggtaaatacaatcctagcttagaacttagtttaaaaatagctaaatttttcgatttacctgttgaagaaatttttaacttggaaggagaataaaaatgagaaaatattctgtcaaaaaatttagcattgtatttatttcaatgattgctgctattctattattttctattataagtgaagaatcttttgtagtcactcctctgaacttatttactgctgttttaatagcagcctctgcttacataattaccggtctttttactcctaaagaaaagttaattggggaaatgaaagaagaaaaaagaaacgctgatgaaagatacatatttaataaaggaaaaatttcttatttcttcttattatttttagctattttaaccccatttttgttagcttttttaaaatatagaaacatatcctctgtttctataaaaagcttagcaataatatttgtttgtatcttttgcttatatatagttgttttacaattctataaaaagaaaaaatgaatattactttctttttatacgctcacctcttatctctaaaaaaaccggctataaaaatattttttatagccggtttttttattttctcacagtactataagaagttgttatttttcctggtttaccatttttcgtatataaatattcattaattactttgtacttgtcttcttttttcgtagaatatttataaatcgtttgacgcatatagttatattttttgagtaagctcgccccgcctccgacaatactagatgcagctgctgcaattgtactcttagcaactcgtccaagtgctcctcctgctgctaaaaatgctaggctataaatattatttgcagctgctaagcttacagtttgttttgttacaaacttatactttgatcctccactttctgtttgattagcgaataatctttttggaccattgttttctacactctgatttacaaataaatcaggattttctttatcaactgaaacagtttgttctagagtattcccttcttttccgtcttctctattcacacttgcatgcgctgacacagatgtggataaaggagtgaggcaaataaaaatagttacaaaacatattacgattttaaaaaatattccttcttttaatttcatatttccatctccttttttgtgaatatattaacaatattacaatgattcaaatttttagtcaattattttttctgatttatttgtatttttgagctaataagtcttctatttagaaaaacaaaaaaagacgaactaataagttcgtctctcgctttatttaaccaatcgagccttccatttcaaacttaatcaaacggttcatctcaacggcatattccattggtaattctttcgtaaatggttcaatgaagcccataacgatcatttctgtcgcttcttcttcgcttaagccacggctcattagatagaaaagttgttcctcagatactttggaaactttggcttcgtgttctaatgagatgttgctgtttaggatttcattgtacgggattgtgtccgatgtggacaggttatccataataagcgtatcacattcgatattcgaacgtgcgccgtctgcattacgaccaaaatgaacaattccgcgatacgttacgtttccgccttgtttcgaaatcgacttcgatacaatcgtagaggacgtattcggcgcatagtgcatcatttttgctccggcatcttgacgttggcctttaccagcaatcgcgatagaaagcgtcgttccgcgtgctccttcgcctcgtaaatgtactgctgggtatttcattgttaatttcgaaccaatgttaccatcaatccattccatagtcgcattttcttcacagaaagtacgtttcgttactaggttataaacgttatttgcccagttttggatagttgtgtaacggcagtaagcacctggttttacaatgatttctacgacagctgagtgaagggaattcgttgtataaacgggagccgtacagccttccacgtagtttacgctggcattctcgtcgacgataattagtgtccgttcaaattgccccatgttttccgagttaatacggaagtaggcttgaagcggtgtatcgactttgatacctggtggtacgtagatgaatgaaccacctgaccaaacagccgagtttaatgctgcgaatttgttgtcgcttggtggaattacttttgcgaaatattctttgaaaatatcttcgttttcttttaacgcggaatctgtatctttgaagacaatccctaaatcttctaggtcttgcttcatattgtgataaactacttcggattcatactgtgcagatgcaccagccaaatatttttgttcggcttcaggaatacctaatttatcaaaagtacgtttaatttcttcaggaacttcatcccaagagcgtactgtttgttcagacggtttcacgtagtaagtgatgtcttcaaactttagttcggacagatcgccaccccaagtcggcattggcattttataaaattgttccaaagacttcaaacggaattcaagcatccattctggttcttctttaatattcgaaatttctcttactactttttctgttaatccgcgttctgtacggaacacagaggtatctttgtcatggaatccatattggtattcgccaatttctggaatttcagtcatgtcgtatcctccttttcgctacttattttgttccttctttttcaaaaatcgctctctccattgctttccatgaaagagtcgcacatttgattcttgctgggaatttcgcaactccagcaagcgcctcaacgtcgccgtattcatcaattgtttcatggtcgtgaccttgcaccatttctgaaaattcgcgggacatttttagtgcttctttctcggttttaccgataatgctttgcgtcatcattgaagcagaggccatcgaaatcgaacagccgctaccagtgaattttgccgcaacgattttatcaccgtccatttttaaatgaagatgaatttgatcaccgcatgttgggttgttgaggtcaattgttacatcgctatctgggagctctccattattgcgcggatttttatagtgatccataatgacttgtctataaagctgatctaatttccggcttgtcataatccaaaatactcctttgttaacttgaggccatctataagcgcatcaatttcttcttttgtattataaatataaaagcttgcgcgagctgtggaagaaacgtccagccatttcatcaacggttgtgcacagtgatgtccagctcgaatcgccaccccatcttcgtccaaaatagtcgcaatatcatgtgggtgtgcgccttctaaattaaaagtcactaaaccacaacgtttacttgcatctttcggcccgtaaatggtaatgccttcgattttgctcatttcttccatcgcgtagctggctaatgcttgttcatgtgcgtgaatgttttcgagtccgacttctgccaagtaatcaatcgccgcacctagcgcaattgctccgccaataatcggtgttccggcttcaaatttccaaggtagttctttccaagtcgaatcgtataattcaacaaaatcaatcatttctccgccaaattcggtaggttccatcgcatcaagcaattcacgtttgccatacaaagcgccaatgccagtaggagccatcattttatgccctgaaaaagcataaaagtcagcatctaaatcaactacatcgacttccatatgaggcacagcttgcgcaccgtcaacgagaatgactgctccaaattgatgagcaattgctgcgatttctttaattggcgtgattgtccctagaacattagaaacatgtgctagcgcaacgattttcgttttctcgccaatcgtttttttcgcttgttccactgaaatcgtgccatcttcttctagttcgatatattttaaaaccgcgcctttgcgtttagctagttgttgccatggaatcaaattagaatgatgctctaaataagaaataactatctcatcgccagcttcaatatttgcttccgcgtaactatctacaactaaattaatcgctgaagtagtgcctcttgtgaaaataatttctgctacttcacgcgcatgaataaacttggctactttacctcgagctgattcataagcatccgtcgctcttgccgcaagcgtatgcacaccacggtgaacgttcgcattatcaaactcatagtaatgtgttaaagcttcaataacttgtttcggcttttgtgaagtggcagcattatctaaataagctagcggtttttcatttatttcttgagctaaaattggaaaatccgcccgaattttttggatatcaatcatttaacgcactttcccttcgattacttcacgaagcatcgtttttacgctttcgattggcaactgacgaacaacaggatctaagaagccatgaataactagtctttctgcttctttttgagaaatcccacgactcatcaaatagaataattgcaacggatcaacacgaccaacagaagccgcatgtcctgcaactacgtcattttcatcgattaataaaattgggttcgcatcaccgcgcgcttctgggctaagcatgagtacacgtgattcttgttgtgcatcagacttagaagcgccatgtttaatgtggccaattccgttaaaaatagttgtcgctctttctttcataaccccatgagataaaatcgtaccattagaagctttaccgtaatgcgtcacgcgcgttgtcacgttttgcgtttgcttaccgcgtccaacagtcaccgttttcacatcagcagaagagccgtctcccattaggtttgttacgttctcattaattgtatcgccatcgttcattagaccaagcgcccattcaatttggctatctgttccaatgtgtccacgacgattcacataagctgtaacttcacttgcaagattatccacaccaccaaaagtaatccgcgcatttttctcagcgatgacttcttcgacaatgctaacaatccctttaggctcgttattaacagtgacatagttttccacataagtgactgcgctattatcatccgctacaagcaacacgtgattaactagtggagattctgctttatcctgtacaaatacagcttgaattggtgatttcacctcgacatttttaggaacgtagaggaaaatcccaccattcactagtgccgcatgaaaagcagtcaatttatgttcgttcacttgtactgcgtctttcatgaagtattttttcacaagttcaggatggtttttcacagctgaaataatatctgtaaaaataacgccttggtcgactagttcttgctgcaactgaagtctcgcaggtctttcatccatttgaacgtaaaaattggcttctttattatctaaatcaactaaattcgctactttttccggtaaagtttcatttgttacgccttctttaaaaggtataaatgtctcaaactttgtaaaattccagcgagtaatttttgttttatccacaaaaggcaagtccagttccccgtaagctttaaaagcattgcgacggatatctaaaaaccaatccggttcattcgcattacttgaaaaagcgtggataaaatcatctttaatcgtcatattttgtgccatgattttaacctcacttccttattgttggtctactgcttcttcttcctcaagttcgataccaagctcttgtttaatccagtcataaccttcagcttctaaacgtttcgcaagttcaggcccgccttcttttactactttaccttgcatcattacgtgcacaaaatctggtgtgatgtagttcagtaaacgttggtaatgggtaatgattaagcaaccgaaaccttcgccgcgcatttcatttacacctttagagacaactttaagcgcatcgatatcaagaccggagtcaatttcatctaaaatcgctaattttggctcgatcattaatagttgcagaatttcattgcgttttttctctccgcctgaaaatccttcatttaaataacgttccgccatttcttcgtccatatctaaaatatccattttcgcatctagtttgcggatgaattgcattactgggatttcgtcgccttcttcacggcggctgttgatggctgcacgaatgaattcagcgtttgtaacaccactaatttcacttggatattgcatcgctaagaaaagaccagcacgagcgcgttcgtctacttccatttcgagtacatcttccccgtcaagtgtgattgttccttgtgttacttcatattttggatgccccataatagctgaggacaacgtagatttacctgttccgttcggtcccatgatagcatggatttcgccagttgaaatttccaggttaacacccttcaaaatttcttttccttctatttcaacatgtaaatcttgaatctttaaagttgccataaaaaagtcctccctagtgtaaaatttgcataatcctagtttagtataattctaatctgattacaactataaaaaccagtattcttcgcattctccccttcattctactattaataaaggttttttaccagttttctagcattatcactgtttctattttatttgagaatccatcactaaaaaaatacaacgtgtcataccaataaatcaaagagatttttcatcataaaaaagggattgtatatctcatttatatatggtattgttgtaacgtaacaaaattgcaacataataacttttttgtaataaacgattaattattgaaggagaatttaaaatatgaagaaagcaataatggctgcgaccatctttgtattgcttttagccacgttatccgggtgtagctcccctaaatctgacttcactgccgccttgcaaaaaacagctgaaaaccgacaatatacaacaaatgtgacattccaagtaaataacctctcagatagttacataaaaaaacttggtcctgaaatcgacttaaatcaacttaaaaaatcgaatatccaatataaaatttctgttgatagtgattcctcctcttcctacagcgcatcttctattcactggaaaggaaagaaaccacttgatttaacaatacatgcacttcaaaacagcgatgacggaaaagcttatattcctgtatctgatttctacgacgcttctgatagcatctccagtttattaccggattcagcagctagaattttcaatcaggtactggatcaaaacaaagacttagaatcgaagtatttaaatctattcgaaacaattcaaaatttttccaatcaaacaattgatacagaaactgtagaccgccaagcaaaagtattgaaaaaaattgaagaaactgctggcattgcgatttatagttatctaaacgacttagatgaccaacacttcacttcaaaagataatggtgacatcatcctaaaattatctaaaaatgagattagcgatttagttaatgccgttctcacaaaacttgatgataacggaagtgttgtagcacttattggagaaattgatggtagcactcaaaaagcagcaaagaaaaaatggaacaatgctcaaaaaagtatccaatcatccttaaaagccctaacaaaaaacaaagcacaaacattagatttcaaattaatattaactcctgacagcaaaaaaggatttagtaaagcgattatcactactaattttgaagataccaaaacaaaagacttaatggacttcacaacaacgattgatatgctaaactacgaaaaagtccctccaatgccagaaggaaaagaaattgtatccaaaaaagaactggataaagccatttctgatggactgaaattatatttaagtagcgctcaataaaaaaatccttttaccaaatcggtaaaaggattttttctattttatttatcgactgggacaacagcgccatcccattctttcgtaatgtaatcttgaatttctttcgagtgtagtacttttactagctctgtaatgtttttatcgtcttttttcttctctgtcgttacaacgatatttgcataaggagagtctttgctttcgattgcaatagcgtctttagaagggtttaagccttggtctacaacaaagttagagttaattgctacaacgtcgccttcttcgttattgtaggcagtcatcaagtaagctgggtcaaaatcgtatttgaatttcaaatttttcggattgtctttaatatcatcaaatgttgcatcttgtggtttcacgccatctttcagcgttaataatccgttatctacaaagataccaatgacacgcggccagtcagatttcgagttagaaagtaatacttgcgcaccgtcttttagatctttaatatcttttacttttttagaatagatacccattggttcgatgtgaattgcgccaacatcagcaaatttgtagcctttttctttttcttctaattcaagatatggtttatgctggaagtagttagcgtctaagtcgccttcttctagcgctttgttaggcataacatagtctgtatatttaacgattttcaagtcaatccctttatctttcaagattggttttgcttgttctaagatttgggcatgtggtgtattggatgcacccactactaactgtttatcatctttactagatgaagctttatctgaggaaccgccgcaagctgtaagtactaaaactaaacttaatgtgaaaattaaaccaagaaccttcttcatgaaattctctccttttttgcggggattccgcgtttttttatataaatttcttcatatacattggttagcgtttgtcggttcgttttgttaaaaagtcgccgataaactggaaaataaagacgataattaagataataattgtcgcaagtaccgttacatcaggttgtccacgttggaatccttcaagatatgcagtattcccaagaccgcctgcgccaatgacaccagccatcgctgtaaaaccaacaagggaaattgctgtcactgtgataccagaaataatcgctggaagtgcttctgggatgagtactttaccaataatcgtgaacatattcgcccccatggattttgctgcttcgataacccctttgtccacttcacgaaaggcaatttctaccatccgtccatagaacggagcagcagagataattaaagctgggagtgctgcttttggtccaattacagttccgacaagtgatttcgtcatcggtaatagtagtacaattaaaataataaaaggaattgagcggaacacgttgactaaaatggctgtaacccagtaaagaatgcgcgctccagcatgttttttattgttagttaaaaatagcaataatcctaacacaatcccgagtaaaaagactgcaaatagtgaaacaagtgtcatatatagtgtttcttgtgttgcgacccacatcatttgaaaatcaacatttggaaataattcttgtaatttgctcatcgttctaacacttccgtttctactttaagttgacgtagctgtgttagactcgcatttatcgcatcttctgtacctaaaacttgtacataaagcgttccgtatgcgccattttgtgtttgtgttaagttcccgtgaaggacattcagcataacatcattttctttggctacttgggatatgactggctgggttgcattttcgctcataaagagaagtttaacaatttttccttctgcataattatcaagtaatagatggattaattcttctgtttcgtcagaatcggtaacttggcgaacgaagcgctgcgttactttttcttgcgggtgacggaaaacatctaaaacatcgccgagttcaacaacttttccgttttccattactgcgacgcgattacaaattttccgaataacatgcatttcatgagtgataacaatgatagttaaattgaggcgtttattaatatctaagagtagttctaaaacttcatccgttgtttgtggatccagtgcagaagttgcttcatcgcaaagcaatacttttggattattggccagtgctctcgcgataccgacacgctgtttttgaccgccgcttagctctgctggataggcgttttcttttccttccagaccaaccaatcggatgagttcatttacccgaaagcgtcttttttcaccgcgcacacctgcaatttctaatggaaacgcgatattttctgccacagtgcgggaccataataaattaaaatgttgaaaaatcatcccaatttgctgacgagcttttctgagtttactgccacgaatctggctaatgagtagattatctacttcaaccgttccagcactcggtagctccagtccattaaacatccggatgagcgtgcttttaccagctccggaataacctacaactccgaaaatctcgccttgttcaatttctaaatcgacatgatcgactgcgagaactttgttgtttctggacgtgtattcttttacaacgttttgtaacgtaatcatctctatcaccttttctacattctgatatacaaaaaaagcctttctgctgatgagcagaaaggcagcattttttcaaatggactaacttccttctcatctttcagaacaattagttgttctgcatgacttagcaccttaaacacataatgaattattgtttaggttgctgggcttcatagggcatttccctccaccactctggataagatttctacatattattaaatcacttcatttgtgactatagtgacgtttcttgttttttcatattaccttttctagtagactttgtcaataactttctcacttatattaatttatttgtaagttatttcactaacgatactattatctgtctgttcattctgactagccatttgagaggctattttaatttgggccctattttgatatttgagttcactattatttatttgaactatgtacataaataccgcaataaccgtaatacaagcaacaacaattaaaacaatatgttttttcattttcctctcctccgtgatttatattctacagaaagaacataaatcacgcggaaagaaacttttaagaattgttaaagattaaattagtggcagtttgacgataaaactggtttggcgttttttactttctgcagtaacaattccgccgtgtttttcaacaatagatttagcaatcgcaaggcctaagcctgttccagtcgtcgtccgatttttatctactttgtaaaaacgttcgaacaagtaaggtaaatcgacattaggaatctcttcaccataattcgtcacgcgcacaacggccatattgtcttctttcttagcactaacatcaatttgtttattgccttctccatatctaagggcgttcgaaaataaattctcaaacaagcgcatgatttggttgccatcgccgccaataattagtttgttcgcatcaaaatgttcgacaatctgcatatttcgttctgcagctcgtccgtcgtattcggccactaattgtcgaagcaactcaacaatgtctaactcatctttctttaattggtaatccacgctatcgagccttgtataagaaaacaaatcatcaataagtttgtgcaaatgacgtgctttcccgtacacaagctcggtgtaataacgcagctcaatttcatcacgataacggtcttcatgtatataacttaaatagcctaaaatggatgtaagtggtgtccgcaaatcatgcgaaacattcgtaatcaaatcatttctggcttgctgggcctgttcttcctgctgcattaattttttctgccgttcccgcatattttcgatgttacgttccagttcttgaatttccggtacaaaactttctgtatcaactggcttcccgtcgttaagcgcaaaattaatcgtacgcagttgttttttcaaaattctttggcgcatcaaacgatagaaaaaagcaaagaatagacaagctattaaaaagataatcagaaattttaacgacatcatccaaaaagattgcatgattcgcgtatatttattcgttccaaataattgaacaatagcctgcgacacttcccgtaaaaacaaagaatcatcccgaatggaaatgctccataaataaatagtttggatggtaatcaacgccaaaacccaagaaacagctgcaaaaaaagtcgcctgccaaacattcatcacatggctaattttcgtaaacaacagttccagtttagatttcaattttgtaccctactccccaaatagtcttaatcacattttctccacccatagcctcgcgtaacttatcacgcaaattactaatatggaccattactgtcttactcgctccaagggccttttcttgccaaatcttctcaaaaatatattctgaactaaaaacgcgccctggctcactcgctagtaaaaataaaatatcaaattcagaagtcgtcaaatgaagttctttgccaccaaccgttacaacatgaagtccgcggtcaactactatcggcccaatgatgactttatcttgactaacaggctctgcttgactcatttgctgcattcttcttagaatagctttcacgcgtacagaaagctctaatggattgaatggcttgaccatataatcgtccgcacctgttaaaagacccatgattttgtcgttgtcttcagccttggcactaagcattaggatgggagtcaaaatcccattatctctcattaatcggcatacttctaagccgttcatttcaggcatcataatatctaatatcactaaagttggctgtttttcttgaactaaacgccatacttccgcaccatcataagcttgataaatcgtatatccttcattttgtaaatataattttactaaatcaacaatttctttgtcatcatcagcaattaaaatagaagttgtcatactcattgtcctttccagtcttatttctacctattgtaacactttagcaacaaatcgaatagaaagagctcggattaaattctggtaaggacccgttcttcttccggctctaagtggataagaacttccgctttagcataaaaattcataatctctgcctcaatttcgtcacatagcgaatgagcactttcaatcgtcatcgaagaagatacgactaaatgaaaatcaatatattcttctgcgcctgcccgtctcgagcgaaaatcatgaaattcaataaatcttgttttatgggccaaaataatttgcttgatagcctcttcttcgtccgcagacaagcgtttgtccattaatggagggaaagactcttttaacaatttataagcctcatacatgatataaaacgccgttagaattgcgatgacaggatctaaccaaagccagccggttatgtatacaaggaacaaactaagcgcaatcccaagcgatgtgaacacgtctgtatataaatgtaatgcattggatttcatcgcaactgaattagcttcatcagccgcttttttgatgatacgagacacgataatattcacgatagctccaaaaagcattaccataataccaagcgctggaaaacgaatttcgtgaggatttacaagtttattaactgattccacaatgatccaaatccccgctacaaatataagtaaagtttcaatggttcccgcaatattctctgcttttccatgtccatatggatggtcttcatcggccggttgattagaaatccgaattgagaagaatgttatgattgacgcaaataagtccatggacgagtgaatcccttccgaaatcactgccacggaacctgtaaaaaagccgacaatcaatttaagtacaacaataacaaaattactacaaacagataaaatagtaagattagaatggttcatagaaaaagcctccgatattttatgtttcactaaaaatctctctttataaaacactaatttaacaactcgaattatcttaccataagcagctgaattgtgtctatagcaacgtttttagttaaatgcagttctatatcagaagcgaaacttttttgcattaaggcaaaattaaacacagaaaaaatccctgtatcactcactatacaggaattcaaaaatggccgttgcatcatgtaattgatagcttaaatcggccggttgaccgttcttaaatttaactagagccggtactgatgtgatttcaagactttgcgcaatatcaggtacataattcaaatttactttcgcaacttccgtctgaatcccgtctgcttctataaccacgtccacaaggcggcttgctatttggcagctaccacacattggagtaaaaaagaaaacaacgaagtcctcaccttttttttgcgccgtccgcaaactttctttttcccaaatttccaggaaaaacgcctcctatcaaaaaagaccagcttcggttatcccaagccggcctcctaaaaattaatctaatactttttcgtaatcgtcacttgataaaagagcctttacatccgcttcttctacttcttcaagttttaaaatccagcctgtatcgtatggattgctattaattaattctggttcatcttctaatgtttcgttaacagcaactactttaccagttactggtgcgtaaaaatcagatactgtttttacagattcaatgctaccaatggagtcaccttttgttacagtgtcgccaacctctggcaattcaacaaatacgatatcccctaattgatcttgagcaaagtccgtaattccaataacataactaccatcgtctgctttcacccattcgtgttcttctgtgtacaataagtcttttggtaaactcattttcaaaactcctcctttttcgtgcaattatctatattgactatttccaagttgcttcaaattcttcttctttgaaaccaagcgtcacttctttgccattcgtagttagtgggcgtttgattagcataccgtctgatgcaagtaacttataagcttcttccggcgaaagtgtatctaatttatctttcagtccaagttcgcggtatttaataccacttgtgttaaagaaacggcggactggaagcccactagcttcatgccactgttgtaactcttcggcagttggcgtttcagttttaatgtctacttcattaaaatcaacatgctcattttcaagccatgcttttgctttcttacaggtgctacattttggataccaataaaaattaatcattttgcctctccctccgattgcattctactactatcatagtgcattttttctgaaagtacaaatggcaacacttagaaaaaaacagagaatttgaaagcgcattcatttgtggttttaaaaatacaaaagccgttttcgacttctgtattttcattttaagatgcgtgattttcttctttcacttcaaacatcgatttcttaaagttaaaccttatcccgagaactagcccgaccgccatcatgttcccgagcagggcactaccaccgtaactaataaacggaagcggaatacctgtaattggtagtaagccgatattcatccccacattttctagtacgtggaacattaacatcattacaacccccgtacaaatgtaagagtaaaacggtacgccaacatccagcgccacacgaataatttgataaattaataagaaataaattgctaataaaatactagctccaataaagccataatctccggctacaatcgtaaaaataaagtcattgtgattttctggaattgcaatggcatcatatcccgcgccgttcccagaaatctgtcctgaaccaattgccgtcatcgctcgcagcacttgatagcctccgccttgaggatcattttccggattgatccacgtcgtaatccgctcaaattgatacggtttaaagccaagacttgtcagccaattttgatgataaataaccatccaaataagcgccgttccaattgccgcgatcgaaccaaacagcggtacgataattttccaagtaattccagaaataagaatcatacccgacatgatagcgataaatacaagggcagtccctaaatcgggttgcagcataataagaataagcggcattaatgtaaataagccaatctttaaaagtaaccaagcatcataactaaaacggtggatcttatacgttcggttatgatcccaaattacttttgctaaaacgacaattaagataaccttaacaacttcagatggctgaatgttccctaagaacggaataacaatccagctctttgctccttttacttctttcccaaaaagcaatacaaatacgagtaaaaatagacctagtccgtaaaaataataagcccatttcgtcagacgatcataatctagttgcatcacgacaataattgcaaatgtcgacactacaaaccacatggcttgtttgaccacaaagttagcatcatattgattatttgttaattgcgcactataaatggacaccaaactgattatcatgagtaacatcattgataggacaatcccgtaatcaatgcgtccagctagtttattttgttgattcattatttaattactccttactggttggtttgtataaacaaaacgaacgctttctcccaaacagtttaaaaaagaaaatcagaaacgattttctttccctaagttaacttctggagcattgtatctcgccgataacacgagcccaagtgccataaatgcaccaagaagtgagcttcccccataactgacaaaaagtagcggaataccggtaattggaagaagaccaattgtcataccgatattttctaaaacatggaacaaaatcatcgagcaaacacccgtacaaatatacgaataaaaaggaatattaatatctaatgccactcgaattatttggtaaatcagtaaaaagtataacataataagtacacagccaccaatgaaaccaaaattcccaccaataatggagaaaataaagtcattatggttttccggtatcgcaatggcttgattaccgattccattcccttgtaactgcccagaaccaatcgcttgcatcgaccgaagtagctgcattccgtcgccaagcggatcctcttccggccttaaccaagaagtaatccgtttaaattggtacggtttaaatccaagtttttgtaagaactcttgattatacataactaagtagattaatgtcccaccaatgagcgcaatcgaactaaaaactggtaataaaattttccaagtaacaccgctaataaataccataccgataataatagcaataaatactagaatcgtcccaaggtccggttgaagtgctacaagaccaagcggaagaatagaaacaatacctattttcaacagtaactgcatatctaagctcacggtatgtaatttatattttttattatggtcccaaatgacttttgcaagtgctaaaatcaaaaaacttttcattaattccgatggttgcaagcttccaagcgatccgatactaatccaactcttggatccttttcgttcgtcaccaacgataagtacgagtacaagcaataagtttcctattccataaagatagtatgccgcccattgcagcttatcatagtcgaaaaaaagtacaataacaacaacgacccctgtagaaataacaatccaaatagactgttgcaataagaaattatttgtatattggtcgttaacaagcccagcgacataaatcgctaccagaccaataatacaaagcaacatcattaaaaatataatcgaataatctattcgaactgccttttttctatttctggccattgttttccgtccttttgtgtttgaatttaaatgtaaaaaaggctgctattcttaaaaagagcaacagccttcatctattataataaagtttaccttggataggaagctttttcaccaaattctaatcttctttctgttttctttaatattcaaaacgagtcgaagcaagtggatgaatatgctgctttccgtctttttcggtaatatccgccgtaatatgaaaaacatcgcgaagaagctctgtcgtgaaaacttctctaggcgagccgtctttgactaattgtccattttcgcatacaaaaacatggtcactgtatattgctgcctgatttaaatcatgtaaaacgagcacgatggttaaattatattctttatttaaatgcacgagtaaatctaaaagctccagttgatgcgcaatatctaaataagtcgtgggctcatctagtaataaaataggtgttttttgcgcaagagccattgccagccaagcacgttgtcgttctccgcctgataacgaatgtagcgggcgataagccagttcttctaagttacaaactttaatagcccagtgaatgaccgcctcgtcctcctcttgcaaagtggagagccagcttcggtgcggcaaacggccatacgccactaaatcatgcaccatcacatctaccaaaccttctggagcttgtgatagcatcgtcattttcttcgctaaatctttagatgggatttcagtaatatttttttcatttaagagaatctctccgctatccggtgtcaaaagacgcatcatcaaacgcaacatagttgatttccccgagccgtttggaccgataagcgtagtgattttcccttctggaatgctcgcgctcacgtttttcatttcaaaatctcttttacgcgagaaagaaacattttttagttctaatgctgatttcatgaagcaaccctccctctttgaagtaagaataagaagaatggtgcaccaatcattgcaagcaagattccaactggaagctcgatggatccgaaccaacttctagctgctgtatcagcaaagccaactaataaagccccgccgagtgcggataatggtagtaaatatttatagtcatttccaatgatcaaacggaaaatatgtggcacaacaagtccaacaaagccaataagtccagctacactaaccgcaacaccactgagaaaggccgccaacataataatgaaaaagcgatgccgttcaacagaaaagccaagtaatttcgccgcatcgtccccaagtaacaatacattagaagaacgaatcgcaaaaccacttaaaacaaatccaactaacatatacggccaaatcatatccaaatgataccaactttttccggaaagtgtccctgtcatccaagaaataacactttgaacccggttgctataaagcaccattacgccagacgtcatcgcaccaataaacgcattaattgccaccccagacaaaattacacgtaaaggagaaacgccgcgatcccatgctagtaaataaatcaaaatagcagtaccgaacgcccctaaaaacgcgccaataggcacaaaggaagctaaagcaggaaatgctaatgtcattaaaatggcaacaaaaccaccacccgctgaaaccccaattactcctgggtcagctaatggattccgcatcacaccttgcagcaagcaaccagcaatcgccagtgccgctcccactaagaaagcaattaataaccgtggcaatcgcaaattccaaatcaattggttagcaaggtcactcccgccgccagtcaaagtttgccaagcgtcgctatatgtaacttttacggacccagtagtcagcccgtagaaaaaagctaaaatgagtaaaacgattactactataaaagttatccgtctacgttttcgccgcggatcatgcgccttcacagttgtcattagttatccaccttatttatctcatctgtcatataatccaatgcttgatcaattttaattccaggattggttccgaaaagttctgctggaagtacgacaatatgatcatttttaacggcgcttgttgaattccaagcttcattttgtttcatttctttcttaaatgctgcttctgtttctttttcgtccccgccgtgaatcattaagaaaatcacttctgggtcagcggcaacaattttttctacgttcatcgaagcgtattgcgggaagttttcaacgcctttaaaatctttcgctacattttctccacctgcaatttctaaaacatttccacttaatgaggacggtagcgccgcataattacttccaggagctcctagaacaagtaatgaacgcacttttttaccttgttgcttcttcttcacttccgccactttttggtcaatattcgcttctaactctttggcttttgtctctttacctaaaagcttgccaagtacggctgtttgttttttaatttcgtcaattgagttggctccggtcaaaacgacttttggtcctaccccttccatcgcgggaacatcttttaagttttgttctgaacttgcgacaatagcatcagcaccaagagaggcaattttttctaaattcaaatcatgcgtattgccgacttctgtagctttcttcgcgccatcagggacaccactcgcatccgttgtttggcgacctaccaccgttccaccaagtgcatagataatattcatatccgcatttgtcagtgcgataattcgttctggttttttatcaaaagaaacatcacgcccggccatatctgtaatcgttagagccgcttgcgatttattttccgtttttgttgtttcattattcatatcagttgtcgtatcatttccacacgatgcaaggagtagtgcggctgttatacttaacatcaatatagttattttcttcataattcccctccacaacactgtccttttcattctactaaattataacacgatattcaaaaagacgaacccctaattgagaattattttcatctatgtttaaatagtcgatatttccctgccgatactttataattaacttaaggaggcgatgaaaaatgactgataatctttttcctaatctatcgcatgaaaattgcaaagaaacgatgcccccagtcacaacggaacaattcaaagaagcagccattctcgaaaagaatcgcaaactcgaagaaatcttaaacatcgtcgataaaaagaaaccaaatattaaaaaataacgaggacctgttcgcgcaggttctttattttacgtttaattccgagttaactcataagataagttatatttattttatttcgcttgaaaatcatgtatactagaaaaaaagacacgtcaggaggcccctacattggctattttagaactcaatttcaaatcagtttgtctagctatgcaaacaagtgtaacggtgattttgcccgaaacagacgcactttatcatggctcgattcctaaatataaaacattatatattcttcacggtttgtcgaataaccacacaacttatgtacgcaatacgaatatcgaacgctatgccactgaaaaagggctcgctgtcatcatgccagcagcagatcatagcttctactctaacatggttcacggtcgggacttttttgagtttgttagcacggaactgccgcacgtcatgaaaaactggttcccactttcagataaaaaagaagatacttttatagctggtcattccatgggtggttacggtgcattcaaggttgcacttacttttccagaaaaattccaagctgcggccagtatgtccggcgtcatggatattaattatatcattaaagaagactgcttcgaaaatttcagtacgcgagccatcacgggtgaaatggctagccaaacaggtacggaaaatgatttatttcatttattagaaacaaatctccaaaaccaagttcccttaccagcccttttccaaaattgtggcacggaagattttctatatgaagataatcttcgtttccgagattttgcgcttgagaaaaatgctccgctagaataccgtgaaggccccggcgaccatgattgggagttttgggataagagtataaaagaaattatcaactggcttccactttaataaaaagaagactcggactcaccatccaagtcttcttttttagtgcgtaaatccgtatgaatcgttgcgttctttgtcatgatacagcactctagcatgttccagattatgaatcgcatctgcaaagtcagcggcaaactcttctgccacgttatagcctaagtccgcccggcaaacaaatcgttgaataatcgtatcacttaaatcagccggaagtggataggctggaacttgccaccctttcatcaaaagctgatcagccaagtcatatagcgtccactctacatccagtccttctttcattttgtaacaaacaatcggtaaattagcgccatcattaataatttcaaaatagccacttttttctacagtttttgccaagtaaatggctgttttctttgttttttcatgaatttctcgataaccttcaaaaccatatcgtaagaaattataatattgaccaataatttggctcgcactacgagagaagttaatcgccatcgtcggcatcgaaccacctaagtagctgacttcaaaaataagctctttcggtaaatattctttgtctttccacaaaatccaaccaacacccggataaactaatccgtatttatgaccggaagtatttatagacacaacatttttaagacggaaatcccaaggtaattccggatttacaaatggtgtaaacatcgcgccacttgctccgtcaatatgaatgactaattgatgttcgtttgtttcattgtatgcttctactttttcatctaataattgaatatcatcaaatttaccagtataagtaatgcctaaaatcccgacaaccccaattgtatactcatcaaccaaatcaaacactttgtccacatcaagactaaggtggtttttatccattggtacaacacgcatatcgacatcccagtatacacagaatttttcccaacatacttggtaacctgatgaaataattaagtttggtcgttttgcctgtatatccagacctcgtttttccgcattgttacgccagcgaaacttcattgccaaaccgccaagcatacaagcttccgaagacccaactgtcgaagtccccaagtaagacatatcttttggcgcattccacaaatcagctaatatattgacgcaccgattttccagttcagccgtttgtggatattcagatttatcaattgcatttttctcgagcgtttctgccatcagtatttctgcctctttttccatgtatgtctgacaaaaagtcgctaagttttgccgcgcatttccctcatccatcaactgatcttttacaagttgataagcaatgcgaggttccatcggctccttttttaatacgtatttcgggatactcgtgctttcttcctcagatccaaagagtgggattcgataactttcctgttttcgcttgtcgtcttcactataaagcatcttttttcctcctttaaaataactgatcaccttctctcaccaatacccattaaaccacagagacaaaccgttcaatttttcacaataatttgttatactacgatggtacttataaggaggttcgttatgtttgatttaatttttccacttttgcttattattcttggggttatttaccggataaatccacctaaaaataaagaaagtcgctttagttatcgaacgaaagcctctttaaaaaatgaaatctcttggcaaaaagcgcatcaatcacttggattttactggatagttatcggggtttctcttctagttttgtcacttgtacttgcttttataccaatgcatgcctttgtccgcagctcaattttattaacgacaagtatttttgccgtattactttccgtcattttagtagaaaaaaaactataataaaaaagtaccgcgctaagcagtacttttctgtaatccattacatataagtccaaaaaaattttactcttcttcttttatgattgtattgcgttcagtaacacgataaatatgaatagtgagatagacacgctcgtctctcgttagttccgtatgatgtgtattaatcaaataagcgtcaatttttttcgtacatttaaaagcttctggatatttaatttgcacttgttcatataaaaagtcatcaccggaatcgacaatttcttttcgaagtaaccgttgtgcgaaatattgtaaatgtgtaataaaacgcgtgtaattcagtgaagtttcatccaaaaccataccataatgatacgtaacaatacttaaaatatcttgaacaatttgagtcattgctacagtcatatgcatctgttgtccatcttgtctagcatttacaatgtgaagcgcgataaaaccagcttcatcctcatccaaacgaattccaacttcttgctcgataaaatctagagccttcattccaaccaaatattctgcgtgataaaatcgttttatttcccacaataatgcgtttttcaaattaataccttgattataccgtgacactgcgaagttaatatggtccgtgagagtcaaataaatattgtcacttaaatctgtttccagcgtttcttgcgcgtactggacaacatcatccgcaacacgtaaatgtttcagtggtatctcgctaagtaattcagagagcttttctgaaagttcatgtgtttccattacgaatgttttctcaatattggctacctccacctcatcgccaatcttcttttgaaaagcaagaccacggcccatcacaacagactccttgccacttttaccctcggcgattacaacattgttattcagtatttttttgataatcatgcattttcacctctttcaaaagaaaaaaacccaaactaattccaatgctattaatatcaaaatagcacttgaattaattcaggttttgcccgccttagcagtaacaatcctatgcttttctctaacattatagtataaaaagaaaccgattacaagtggttttttgatattcaattttggattactttatatcttccctactttaccacaacttattcattgacatgtagttttctgcatgctatttttggctggaggtgataaattatggcaacacgctcggaacaaatttttattaatttgcctgtaaaagatttacaagcaaccgtcgcttttttcacagaacttggctacgaatttaatccgcaattcacagacgaaaatgctacccaaatgctcatcggagacaatattttcgccatgctcttgaaagaagatttcttccagactttccataaagaaggcatcgctgacacaacaaaagcacgcgaagtcctcatcaccatcacccaagatagccgccaagccgtcgacaaactcgttgaccgtgcttttgaaattggcgccaaacaagcaggcgaaacacaagactacgacttcatgtatagtagaagttttcttgatttagacaaccatctatgggaaattgcttatttagacgaatccgctttaaaataattacaaaaaaagccgttggaattcatttgattccagcggctttcttgaattttcgtatttttttaatcgcccagtcgtaatggctagatgtacttgaaataaatatggcgcctagtgaagtagtattggtccatttataatatttttttgtaaatagttcttcctccgaatgccctgcaattaaaaccatttctttgttatgggtttcatccagtaattccctcgcttgcgctaaatcagtctcttggtatttctgccaaatgaccaaattaagctctggtgtcgttttccacgtaaaaccttctgctggcataaatggtttcttcccacccattccaacttcataccaatccagcgccatcttatgccattcgtgcaaatgtattacaacatcccgaatatttttatcccggtcttcaaatggaaacgtgagctgttgcttttcttttggaatagaattgattaaatcgttcaattgttggtacttttccgtgctttgttgaagtaattctactttgttctttggtcttgccatagaaacattacccctttctaacaattatgtaagtttaaattatcattttgtcgctttacgcgagggatttacatgtcatttccctatacaataaaggtaacacttttgcaaaggatgatggatatgaaaaaaatcgttatacttattataagcttactattactcgttgggattggattcggtgtatattactttaaaaatgccaatcatataggtgcagacgtatcgtatattaaaatcacaacggacggcgaaaaaggcaaaaacgtaagcttcaactattcctatacaatgcctgcatatgatgaagctgggaaagaaacagaagttactttttctgcagacaaaaatttacgcaaaggtgcttatttaaaattgtatattaaagaagacaaaggcgtaacttcctatgaagaagtccctgaaaaagaagttccctctaaagcagcagaaaaacttaaataataacgaaatctcctccttatgaggagatttttcatattgaaatatatatatctatctcgccactcgtatgataccattcaaaatctgttttgtacgctcgttttaattcactatctcgcgcccaaatcttctgccaagtttcttccacgcctttatgactcgcattatctacagaaaaaactaaataatctcctacttcaattaagacactcttctcttcatcccagtcttttgttcctaccaataaatcatagtcacccttataatcactggcataattactatataccgcaaaaatatctccagccggtttatcgaccatcacttcaccccaaagttctgcaattggactgaaattagcattatttgcgcgtatctttttcccgaaaacttctttagtttcttgtaaaatcattatttgccgcctccttttaaaaccattatagcgaacaaaacctgacaactatctgtcaacaattcaaattaaaataaagtttttccacttcagatttgtagtctttttgaagcgatgcaggttctaaaattttcacggcacttccaaacatcaataaaaacgggatgatgttgcgttccaaatcatagaaaaagcttacacggacataatcgtctccagtctccatttcttcttgcaaaaaataatccaacaatttcccgagctgatttttcggaaattctaacacaattcttttcatttctgcaggctggtactccgtttcttcgacttccataatcgctttatcgatttctttcaatgaagttatccgcgttaatttaaaatggcgtatcgctgctcttttgtggcaataggcttctaaataccaactaccatccatcaagtttaatttttgcggcgagatttcccgcgttgtttctgcaccactcatagcgatatacgtgatttttagttgtttatttgtcgtaaaagctttttggatataagcgatttttcgtttcacttctgcttcgatttgctgacgatgttgtgtcgctgaatcaaagaaaatatgcttactagttggtttttcggtctgtagcagcgtgattttttctcgcaaaatctcttggctatcattcagcataaactccgaacgtgcctctaaagcttccagcaaaatctgtttttccgcctctgaaaaagtaaatgtcgctagcttatatgtatcgagcatcgtgaatccgccgttttttcctggcaaagcaacaactggaaatcccgcataaagtagcgtatccatatcgcgataaatcgtccttgtgcttacttcaaatttctcagcgagctcacttgccagcacttttcgctccaaaatcatgactaatattgctaaaatccgttctagtttcaccccaaaacctccaacaccttttagccttattataccatgcactattagtgatcaaaaacccatgcatacgtgatggataaaacttctcgcatcattcctttatactttgcaaatgtctgtgatgttgcaggaaggcctgatgcatcaattccttgacgttttgctaacattagcgctctatacatatgataatcacttgtcacaatcactgtttttcctaaattaaatttcgcattactatatttaatattctcttctgttctcttagatttcgtttccgtttcaatccgctttcttgcaattccttcattaaccaaatattcttccatgacggaagcttcagtcgcactttcatcagccccttggccaccactaacaatcactttcgcctttggatattcgtttaaataagcgactgccgcatccaatctttcttgcaaaactaatgaaggaactgctgggttccccttcacttttgcacctaaaatcaacactgtatcagcattttcacttggtttcgtcctagaaccactaaacataaaggccgcgacgattaataaatacataaaaccaattatgattaaaataatgacaattttcctcagactcctcatctagttcgtcctccctacttctttattaatagcttagcagaagattttaaataaaagagaaagaaataatcaaattaagggaaatttgaaaaacaccccgaaacagttttgaggtgtttttgcattattagttctactaaaaatactcacatgtgattgattctattcagtattatcatagattctccgacttttttaaatatatcgcatacataattaaagataaaatacttgctgacaccgcgatgagaaatgctggttctactaattcagagacataagcatctataatactaaagttgaatgaatcaaatccaaataatggccgaactgccaaattaagtaaacctaaaaccaatattaaaattcctataaatggtacaattctatttttacctcgctgaaatttcggaataaatatagtacataaaaatcccaaatatccaacaataattattggttgcatccaaattaatttataagcaggctcatatactaattcaaatgttgctgcatctatcccgctagacatccaagggaataacaaacaaattactgctattccaaaaaatgcaatgcttaataatctatacataagcaaacctcctcctttggtacatattagcataaaaagttaatgtataaaaaaactgctcaagaatggcttttcttcgttttaaataagcaaaaaaatggttttttatagtaattattacactttatgtgttgaatttgctctttttagataaatttcacacctatatgtggtcgttattcaaaaattattcagtttgtaaatcaaacagcaaaaagcgccataaaacattcatttaaaactattcatttatcattttttattaattttagtagtaaagaaaaaaattacatttgaatggatatgtatatttattcagtccacatggttattctaaaatcgtaattgttttcttgactccatcgtttagcacccaaataaaaaagtgatgcaaacagcttaacaaagcagcttgtatcacttttcattatccataaaaatatggagatggtgggagtcgaacccacgtccagaaatatcggcacttaaatatctacgagcgtagtcaccgtattagcatttcgcataaacatcggcccagtaacaggcttccattcagctagtctgattaagctcttctatttaaccccagacggagattaactagtgtagcccacttagagtgagacccttaccgtagcacatgggcgatgcacggaggatcagctatgctactgcttattaggcagcgaaagctaggttttgtttttctttgccagttattattggctttgacgttgataacgaggacgatccccccgactcgcaactcaagctcgaactatccctgtcgaatccgtaacatccccagagttaaagtctaacagtagttattatacaggaaaaaacgaggctttacaaacagaaaaaacttgtgacatagccaaatgcgcaactattatttagcatgtcacaagtttcccattaattaatggttattttcactgaattattctgcagatggcataactcttacattatcaatgtgaatgctcgttcctcctggggaatccatttggaaactagtattaatattgcctgttgttactttgacatctttaattgttacataatgccaaacgtcatctgcaactaagtcaattgttttaccaccgctgctgtcataattattaaccgtcatttgcgcttttgctgcatcatctttacttactttaacccatgcttcgacatcataattcgcattattaaccggaactgcgatttgttgagcgagtgtctgtttgtaagcgccaggtaagtagaaataagcgctctgtttaccaaatgctggtgattctggaggattgactccagagccgctatcaacgccgtatgccttgtcttgaccatcaggatgagactctacccaattggtcgttgcagctgcatcccgctcaaatccgccgttatcgagtagatttacttccgactgtactggtgaattgattggctctgccgaaacaagaattctatcaatatttacattaccagtagtttcgccgtctcttaggaaggtaattttatttgttcctgcttttaagttcacagctttttctgtatctgaccaaatattccaattttcacctttggaagggaaagttacgcgagaattgtagtcgccattcgtatataaatcaagtgtttgtggcatgccagttccatttgctgttcgtgtgtttagtacgtactcgccgtcagctggtacatccacttcaaacttgatttcatctcctgctgttccaaatccaccaacaaagccttctccactatagaaccaatgatcattcgctacttttaatgtgccggcaaggtccgcttcctctgcttcgacttttgctacagttggtgtgaaaccgatatttactttatctagtgatacttgatcagctttatcgcctgtgtccgttaccactttataagaaatactatttttccctgctgaaagtggtaatgtttcggactgaactgaccaatcggtgtttggttttagcgtggtttgttttacatattcaccattgacaaaaatacttaatgcttggttgtctgaggaagcatttttgtaagttaagtccacattataatcaccagaatcttttacatttgcatagatagttgttccggcgccgtctttatcgtagccatccacatacgttttttctgcaacaggtttatcagcaacagtatctgcaaaattggatcctgtttccatttcgtatgttcctgtttgtacgatacttgcagaacctgaagttgtaatgacagtatctgcatcagcttgagctggtacttttacgtatgttactgctccgtaaacatcgctacctactgcatatccgctaccatcggcattttctaaagcggataaatcgtcataaactttgctatctgcgccatttacttggacactttcagccgcatttccgtgtagttttacaatgtaattctctgtgtctgctttataacttccttctttcgcaccaatcgtgaaagtactagtatcagcagtttttgaagtagtcattttttgttttagataggtatctttttcataatcaaaagattttccgtcgtcatcgtaatgtgtaaatgatgtctctttatcagatgcaaaagtgtctaaataaattgttttgactgctgattcaccaacatagttttgcggttgttgcattggcataatggcaccttgtttaacaaacatcggcacatccgtccagtcatcgtcattcacttcataattgattgtttgatttccttcgtaaacatcgccacgattgtagtcaatccatgttcctgctggtaaataaatatcacgagaaccagctccttcttctaaaacaggcgcggctagtaatccgtcaccaaacatccattcatctgttaaattaactacattttcatcagtaggattatcaaaagtaagtggttgaactagaccaacaccagagtcatatgcttgacgttcataggcatacatataaggaatcattgaatagcgccaagtcatgctgcttttagctacttcttccgccgtgccaccgtagaaccaaggctgacgttgttgattttgattaccatgcgtacggaaaactggaactagagaactaaattccatccaacgactataaagttctgggtctggatttaacacttgacctgaattggcgttgaaaccacctgtatccatgccccattttgtctgccctaggttaatagtcgaaagcattgtactaggttgttcttgcatcccatttgcccagtcaataacttctccttttttccactgaacgccgatatcaccggaccaagtagaagtagaataacgctgtgctcctggatagaaggttcttcctgtttgccaaacacgttcatttgtatagtcacgttgaccttcatacatggcctctgatgtaaatccagttgtgaaattaccaaaccaataatctgctccattagaagatactttgtctgtttcatcattccaccaaccaacaatccctttatctaaggcatcctcagaatgtgaccaccaccaattacgttcatctgcattgtatgggtcaatacttctaactgttacagggaatgcataatcttcatatgcagattgtcctggataccagtaaccatttgcatctgcatctttcccttgttgcgttgctgttccatcttctaaattagttacgacacgcggttttgtaatcccaatcatttttacaccaagcgcatccatatcagattttaacgttgtgtctttggcagatgggaagttttctgtattccaagcaaactcaccataatcgccaccatacgtaggatctccgtagaatttccaatcataatcaaacgcgaaggaatcaattgggatgcctttcgcacgatacgtattaatgttttctctaaattccgcttcgtttgttccccactcaaagttagagaatccaagcgaccatttcggcatcatcggtgtatgccctgttacatcagcataagatgacataatttcttctggctcgccagacattaaatacatctctacattttctttcacgtagcgacgcccttcaacaattgtatcgccgtaataaaactctaatttttcttcatctgaaacggaatacgggtagccgccatcactatctacaagtaagccatatcctgctgtagaccacatgaacggaccacctgcattaccttgttgtcccgcttgagcagtcttattactatcggcagcagtgtcatcacgttccatgccaaggtctccgtcactaaaactaattccgtatgcaccgtaaacatggtcagaagcaccgcgtttaaatctaactccaccatcaaaaatcccgccgtctgccgattcagacaataacgttttcccatttttatctttaaaagtcattcttgctggctctttatcaatttcaagcgtacattcgtctgttgaaataatcattggatctgattctaaatcaatggttgcaccaatcgctgtgaaagttgcattcggatcaatcataggtgtagatggactattttcgatattgcgtggacgtaaattcaccttgagtaaattattcgctagcggggaaatttccaagtaatcatcttccgcctcatccccgttatcaattttaagcgtaatgacattgtctgtcaccgttgcttcaaggacatttccaagcccttcttccgcacttaatttcgcatattcttctttactaagttgcttggcagtttcagtatttgcttttttttgagtctcttttttcttcgtctcttccgctttaacttccacttgtagtggctgagttatccctaaattcagccaaactagtggtacaacagctaaactgacacaaacttgtttcataccttttttcatcatctcgcccctttttattctgtaatagttactgggaaatcataccaacctgtatattctccagagttataacctaatgaaatttctagcaaatgctctcccggttgtaagccagctgtttcaatagtgtacatgtacgaaccatcataggtcggataaggtggttcataaagcgttctgccattgtccttaataataattaaatcgtgattgcttggtgcgataaaatctaatgcttggtaaataaaaggaacaaaaacttttaaattttctccttgtttaatcgttgtcggaggataagttgctgtctggttagcaaatgaatgtgtgcctaattgttgtgatagaaagatatcttctggaatagaaattaaatgattttcattaagaattagtgaatctaagttaggcatattcatccaaatatcttccgctatataaccagacagtccagcgttttccatgttaatacttactagtccttccattccaacaaactttggaatattgaagccaaaattattttgactcaaatcaacattggttaagttaggatagtttgcatctggaaaaaccgtaatattagccccatttgcttcaatattttctaaagcaggaagcgcttcagataaatcaggtagttctccaatattattactccaaatcgctaattcaatcgcattcgtaaatacttcattgtttagcacacttaggtcttcccctgttaaacccaatgagggtaaaggaatggcagtcattgtatccaaatctgcttgcgtaatcgtgtcattcacagaatctttatctagttctcccgcaatcgcctcagcaatcgcttctaccgggaaagcctctataataggcgctggtaacggaactgtatctgcttgtgctttgattgttggtgcaaataaaattcaacaaatagcaacaaacgtcagtccaattatttttttcattcattccactcctttcaatatagccaccctttctatccatgaaaagggcggctaattctttattttttaataactacatgatcaaaattaattcctgctgtatcatctgcttcaaaatcaaatacaacttggttattaccagcttgcaaggttactggaacttctactgtgttccaagtatcccaattagccgtcttcggtaaagtaatttgttgttttttaccattgatatatacagttcttgttgcatcttctactcccgcactgtagcgaacttccattgtataatcggaagccccatctactgcatcaatatcaaattctaccgcttctttttctgcgtcaaagccagctacaaaaccagtaccagtgtatccagcatgatcacttgcagtagttacatttgtcagatgaccaaattccgcttcgtatggtgcatggtttacaccatttagtacgattgcttgtttggcatcttttgctgctgcttttacatatgttaagttttgtacagtatcatagtagtaaccagttgttgcttcgttaaatgcatctaatgtatctgctttagctacatctgccccgtcaattgttacacttgttggttccgtactgaaaacttgcatagttgtttcatctgccattgctggaagatctacggaaactttttcatttgcaaagtcttcagaaacactgatgtcacgcatttctccaccgtttacatcgtcatagaagctatactcactatctccagatggataaactcggaaagttaaattatcataggattttaaatcgtttccgacgttttgaccaagttggtatccatctgtcatattcatcggaataattgctccagcttttgcaaatacaggaagcgtatctacatcggcataataagaaattgtttcgccaccagggtgaaccccaccgttccagatatcaacccattcgccttctggtaaataaacttctttttctgtttggccttcttgaacgattggtgctacaagtaaatcgtcaccaaacatatactgctcatccaaatcacgtgcattgacatcttccggataatccattgccatttggcgcatcattgattttccgttgtctgcagtgtcttttgccgcagtataaatatatggaagtaaattcattcgtgtatacaaatatttttggaacgttggtaaaatagtttcgtcacctgttctagctactgcattccaaggtgaacgttcttcacttggcgatggatctgatttttccgagtggaattgcataatcggtgcaaaagctgccatagctgttgcgcgtttatatagttccgctgttggataatctcccgtaaatccagccatatcccacgcccagtatgaaacgcctgaagttgaagcactaagtccagcttttaatgaagcttggaaagagtcaaatgtggaagtttgatctcctgaccagtaaatgccagatttttgtgcaccagaagttcctgaacgactaaacgaaactgcttctggattaatacttttcgcaaaatcaaaataactcgaaacgtagtcagttggataacggtttctcatttcttgtcctttttcgccgttagagaaagttgtatcacgtccccaaaccatctcgccaccatctgtcttaaatccgtcaatccctacttctgttaataaatactcacgctgagaagtccaccaatctacagcatctttattagtgaagtctagtaaaatcccatttccgaaccactgagatgccggaactcggtaaggagcccctgttccatcgtccgcactatacccttggcttatcatgtattcttcatcattatctctttgttcatatactgtaccatcatcttttaatactggaacttgccataaaacgatattcatacctgcatcatggacactatctaccattcctttaggatcagtccatttcccgttgaaagtaaaatcgtcatagctaaacgcttccccgtttttctttgctgtataggtcgcattgttccaaatatagtaagtttcttcatcactccattgttctaatacaaaccctgttgctggaatatcatttgcctttgcattagaaagtgcagagcttacatcggattctctatcccactcgtttgctgacatccaaagtccaaaagcccattttggtagcaaagtcgttttccctgttatgtctgtgtaattattcacaatatcattttgatctttcccactaataacatagtaatcaagcatattcgtcatatcgccatcattgtccaatacaaagctatatttatcttctactttggaagccatttggaactgtgaatggaaatcagaattaacatacatcccgtatttattagcacttacaaaaaatggtaccgctaaataggttctttctgtctgcgcttgatcttgatactcattgtatacgtatgtctctacatcttttccgcgttggttaatcgtgtcataacgttcaccaaaaccataaaatgcttcatcgctcggtgtcataaagttattttggtattgattgatgacatttttaccatctgttaaccaacccaagctattagctgttgtatattcacttgtaagtaaagttccatctgcttggtgcacttccatacgataaggtgatttctggatttcaatgcttaaatcttcggttgttacggtcactttttccgccgtatcttctacagtgtatccagatttcccagcatgtcccgtttctttaccagttggtgaaagttccatacgtagtgtatctaaatcttcaaatgaaagatataacttcggcgagaaatcccctgctgttgctgtcatattcaaagtaatagaatcgccattatccactacactagtaacatcttgcacatattcccaatccgttacgtaaaatgtaaatggcccgctttcgtaggcagttcctccattggttgaacctttcgttgtataagtaatttcatcgcctttttcgaatttgcctaagtccgctttccagtaagtgttgttaccactgttgtaatcgtaagcagctgtgacgttttcttgcgcgacgccattcttcgtccactctacccaaacatcttgtccattttcaattggccaagtggtaatatttagaatgacatcttcgccagcttttggatctcttggcgatcgttctgtcggctgaactgtgtataaatcatcatccccataaggcgagtgatattccccgtccattgcgaaaacattcgttccaaatccacttaaacaactaaaaattaatatccccagaataaaaaccaaactgcattttctcgttcttcgcttcatctcactttcctcccttaattcaccttttttactaaaaatatactactttcgatgtgttattttgcaaaattattaattttagaatatctatattgtgtatgtaatcacataatgttataattctttcacagataaaccaaaaatctccacattcttactaatttcgcaaaaaaacgcaactatgccaacccacaaattcatggaaaaacaataattgcgttcatcagaagaccttgcttaaaaaactttaaaacaaccagttaatactttttaacaaagttaacatgtcttctccctcctttttcatctatacagaaatactaactcacaaatcttacataaaattaaaaagcatcaaatttgaacatatggagctgagttttatgcaaaatattggagacacattaaaatttattcggaaaagtaaaaacttaacacaacaagagacttgtacgaatgccctcagtcgttctaactatcaaaaaatcgaaaataataaaatcatgcctagtatggaccgttttatccaaatcttacttaatttcaatatgacgttagaagaatttgaatttgtaaaacgggactttacaccttctccaaaagaaaatatcctttatctatactccaagattattacctcctcagaaacagatattttactcgatgttatttccaaatgtgatgattacttagcaaaccaaaacgacattttcatttctgatattaaagcctcacttgaaggcattttactagctgaaaaagaacataattttgaacttgctcgagaaaaagtagcttacatttgggacagactttcggaagcggatgaattattttggaatgacatattaattttaagaaatattttctttatttttgaaaatgaaaccgctcaacatattgtaaatcgccttatctctcaacttaaaaaatatcgttacctatatccaaccctttcgattgagatttcacttcatgttaatcgtgctacttatttaattttagacgaagaatatgaactagctttgcactacattgaattatctataaaaatcgctaaacataaccattactacttacaattctgtatggctgttgcgaaaaaaggaattgtgctgtataagctagaccaaaagcaacaaggtaaacactttatgcaacgagcgcttagagtggctaaagtgcttgaagaagaacgcattctaaatggtatcaaaaatgaaattgattattttcttcacgacgaacttcaagatctctctttaaatgaattcaccaaaatcgatatataaaaaaagcctaaatctagcttctccaacgtatagttgaatgactagatttaggcttttattgttggcgctctttaaaagcgcgttcgatatcacgttttgcttctttttgttttaagtcttggcgtttatcgtatttctttttacctcgagctacaccgataagtacttttgcgtagccatctttaatatacatttttagtggaacaatcgaataaccggactctttcgtttctccaattaaacggctgatttgcttcttatgtaagagcaacttgcgcgttcttagtggatcatgattgtagcggttcccttgttcataaggactaatatgcatattgtgtaagaaaatttcccctttgtcgatacgtgcataggaatcttttaagtttacccgtgcgtttcttacggatttaatttcagtaccttgcaggacaatgccagcctcaaaagtttcttcaattgcgtaatcgtggcgcgcttttttattttgcgcgactagcttaccatcaccttttggcataactccccatcctttctagcgacgttttttcttcttcgggctttcttttgctacaccttgataaaaaggttttttcttctttttctttttaggtttagtataccattcgtcatctttgcgttctgtttttggtttcacgtcttctgatttaccagttctgcgtttattccgattattttttgagctactcttgaagtttctcgttttatcaatcggtttttcgcgttggcgtttttgtttatcgctcactggacctggtttaccttcactacgaagcgcaaaatcgatttcacgagcatccacgtctactttagttacttcgacttccacttcatcaccgatacgataaatttggcctgttctttcgccaatcatcgctaactgattttgatggaatttgaagtaatcgcctttcattgcgctcacatggacaaggccttcaatcgtcgtcggtagttcgataaataagccaaaattggttaccgaactaatgattccgatgaaacgttcgcccactttgtcgaccataaattccgttttcttcagttcgtctgtttcgcgctctgcttcaacggcgcgacgctccatttttgagctgtgttcagcaatctcaggaagctcctcagctcgtttttctaacgtttccggacgaacatctccgttaattaaatactctctaatcaacctgtgaacgattaaatccgggtaccgacgaattggcgacgtgaaatgtgtatagaaatcagtagacaaaccaaagtgtccggcgcttactgtgtcatacttcgcttgttgcatcgaacgcagcataacagtcgaaacaaccatctcttccggtttaccttttacttcttctagtacttgttgtaaagcagctgggtgaatatcgttggctgttcctttcacaatcaagccgaagttcgtaatgaattcaaagaaccgtgctaatttatcttcttttggatcttcatggatacgataaataaatggcacatccatccagtgaaaatgttctgcaactgtttcattggcagcaagcataaattcttcaattaaatgctcccccgctgaacgttcgcgcatcacgaccgcttctggatgaccgtcttcatccactactacacgtgcttctttaaagtcaaaatcaatcgcgccacgtttttcacgtttacgacgaaggatttcggctaaattttgcatcgcttcaagcattggaacgattggcgcatatttttcgcgtaaagcttcatccttttcgactaaaatatcatttacatccgtatacgtcatacgttccgttgttttaataatactttcaaaaatttcgtggttaaccacatgaccttcttgatcgatttccatttcacaactcatggtaaaacggtctacttgcgggttaagcgagcaaattccgttcgatagtttatgtggcaacatcggaattacccggtcaaccaaataaacactcgttccacgctcttgcgcttcgatatcaagtggcgagccttctgtcacataatgcgttacatccgcaatatgaacacccagtttccagttgccattcggaagttgtttcaccgtaacagcatcatctaaatccttagcatctgctccgtcaatcgtaataatcatttggtcacgcaaatcacgacggttaccaatatccgaatcatcaaccaaatccggcgctttacttacttgttccattacctcttcagggaagccaatcgaaataccatgtttatgaataatcgataaaatatccactcccgggtcattgcggtgcccaatgattgacttaacaacccctcttgcacgcgcatggccagttgcatattccgtcaattcaacgataactttatgcccgtcaactggttttaagccgtcttctaaatcaatttccacttcaccaaaaagtcgtttgtcgtccggcatcacaattggagtaccagctaagtcctccatataagttccgacgatttgcgttgtcttccgttcgacaattttcttaatcgtaccttctgccaaattatcgcctttacgtttcgtaattgtagcaaaaactaagtcgccattcattgcgtcttttacttcatttggtgggataaaaatatcgtccatttctttctcttctgggagaacaaagccaaaacctcgttcatgtgcgcgaaatgttccttttactaagtccattttttctggtaatgcataccgattcttccttgagcggacaatagttccggaatcttccagttttactaaagctttcaccattaatttaaaattatccgcgttatttaaagctatttctatttccaaatcttctagcgcaaatgttttatcaggcgctgaagttaatagattcataattttttcttccatttgtttttgttccacttctgtccctcctctctctgttttaaaaattgtttattcttgccaatccaaactatctaaaaatgttaaaatggcttggtttacttcttttcgttctttgtctaatgtgatgacatgaccagattccttaaaccagtgaagttctttcttcgttgactctactgtatcataaatcagctgtgctccgctgacatcaaccatatcatctttttcaccttggacgaccataattggtgcatagatcatatctatttcagccacgacgccacttatctcgtcttttaatttagcgatggtattcattggggcgtctttataggcaaccatttcagcatcgatttgttcagttgttttaccttctaattttttataattacgcacataatctaaaaagccttgaattatcggggatgagctgtccattcttgttggagtactcatggctataattccctttaacggcctagaaaaacctaattttagtgaaaaaagtccaccgagcgaaagtcccgccacagcgatttcagtatagccgagtgattttaggtgatcataggcttcaagaacatcttcccaccaatcgtttggtcccgtttttagcagtaggtcgggagatacaccgtggcctctgtattgaggggcgtagcaagtgtaattgttttcttgtaaaaacctacctaatattcttacatccgctgagctacctgtgaaaccgtgtaagagtaacactgctcttttgcctttttcgaataggaatggttgtggtggtgttattttcatagtgaatatcgctccttggttctttttggaggtttggttggtctgaggtggatgttatttttgttggagttctaggggattggttgaatttaataatttgtgcttcccttttcgggttgttcgtccactttttttaatggaaacaacgctccacttcgttacgccttgtattggagttctagggaagcggactacacttctttagaactccaacaataaaaaaccacctaaattttcattcaggtggttaacatctcgttactgtacaaagtatgccagtgcaattagtattgcgaagaaaacaacggatagaacgatggttgtacgatgtagaataagttctagtcctcttgctttttgcttaccgaataattgctcagctccaccagagatggcgccggataagccagcacttttacctggttgaagtatgataactgtaattaacagtactgatacgatgatgagtaagaccgttaaaactgtactcattgttctttcctcctaaaaccgcccaatttgactaagattaattttaccatatttgtgattatacgtaaaggtttgtttccatacaactaaaggaatggattaaaccactttttcctcaagccaaactaaatcgtctaagaagtaaatcaagtcttcttctaaaatgtctttctcacagtcgttcacaatatcatgccctgaacctgcatagaaacacagttgtttatcatttgtatgaatgtgcttaaagatataattggcgttatctgcatcaatttcttcatcttggcagccttgaccaatcatggttggaacatggattttttcaatgtctcgcgctacgtttttgtagaatgtagcacgtgcttccgtcattacatcaatttcaggaaggtagttttttagcatttgatctgcttcttgttctactataccttgtttctttaattgtttagttaaatagttttcgatcgggatatagcgcattttgcggtttacgttggcgcatagtggaacaatcgcttttggtgaaaacgattctgccattttaagcgcaaaaactccgcccattgccacaccgacaattgcaatttcattatatccatctttttcaagttgacgatatccagccaccgcatcttcataccacatttccggtgttgttttcaagaaaatagcgggttcatccccgtggcctctgaagtttggtgcatgtactgtgtatccattttctgctagaatttctccaagttctcttacgtcttctgtagtccctgcaaagccatgcaagagcaaaacagcacgatttcccgcttttaacgtaaagctacgatccgcactcatttttacgcaatcctcctaatatcatcacttttataatccactctattgtagcccatctgaactaaataagctaccttttgagttctgaccaatagaccaatattaacgctatccaaggaacttgtcaaacacttttttcacgaaccttaaacacgttggtattaaagggttttaaggaggtttcatttgtgaatttctgcgcttaaattagaaaagaaactatgaattaattgtaacaattgtttcggtttttgccgcggtaaataatgaagtccattccttacaatgaccatttccccgtgttgaacagaatgcaccattttcctagtatctttggaagatattaaatcatattcccccacaacagctaaaagtggtgcgcttattttttgtaaatccgcttctgacatatgtggatgataaatcgttaaagcaagttgtcgtttcattcgctcaaaaaagcgactaaatggcgctaaaagaaatgcagccccgtaagcaactcggcaaaacaagtctggtaaaaatcgaatttgatttacatgatagtttgttccaataacaacggatgcgatttgacgatttggctgcattttgcccattacgagagcaacaataccgccgtcgctatatccgataactttatatttatcaattttcaaataatcgagtaacgaaagcatatctagcgccattacttcaaaatcaagcggcgtatttccagcttcacttttcccgtgtgcgcggctatctacggcgattacttgatgattagtagagagatcatcaatcatacgctttaaagaacgatgattttgaccattcccgtgaataagcaggatcggttcgcctttaccgattatttgataaaacaagttaattccattgatttctgcaatcatatagcatttctccttgctgaaaacattttctacccttattttacacctgattatacttgatttcctataaaaaagctttcattttatttaaaatacgcctgattcttttaaagctagaatcaggcgcaccgtttatttcataagtcttcgatgaaactgttgttggggcatatctgcgttaatgattttcttttgtacagaatgcttttccgctaaggggtggcttttttcatgcaccacagcgtctttgattttcggagtttcgagcacttttgaggcctgactattttttactttcatcagcattacctcctcttccaaatcattacccctctcgttatttttaaaacagaaaaaactccgcgaagatgttgcttttcgcggagtttagcgttttattcaatcaacttatttttttaagttgtagaaagtgtcgttaccatgatattcagcaagatcagccaaattgtcttcgatgcggagtaattggttatattttgcaacacggtcagtacgagtaggtgcaccagttttgatttgaccagcgtttgtagctactgcaatgtcagcgattgtggaatcttctgtttcaccagaacggtgagagataactgcagtgtagccagcgcgtttagccatttcaattgcatccaatgtttcagtcaaagtaccgatttggttaactttgattaggatggagttagcgatacctttttcgataccttctttaagtttagttgtgttagttacaaatagatcgtcacctactaattgaacgcggtcaccaatacgttctgtaagtagtttgaatccgtcccagtcattttcgtctaggccatcttcaatagagatgattgggtatttagtaatcatttcttcataccaagttaccatttcttcagaagtacgagttacgccttcacctttaagttcgtatttaccagtttcacggttatagaactcacttgatgcagcatccatcgcaagtttaacttcttcgccaggtttgtaaccagcatctttaattgcttgcatgattgtttcaagagcttcttcattggatttaaggtttggagcgaatccaccttcatcaccaacaccagtgtttaagcctttacctttaagaacagctttaagtgcgtgtaggatttcagcacccatacgtagagcttctttaaagtttggagctccaacaggcattaccataaattcttgaacgtcgacattgttatcagcatgttctccgccgttaaggatgttcatcattggaactggaagaactttaccgttcactccgccaagatattcatataaatgtacgcctagttcgtcagcagcagcacgagcagcagctaaagaaacaccaagaatagcgttagcacctaatttacctttgttaggtgtaccatcaagttcgatcattgctttgtcaattccgatttggtcagttacgtcaaaaccgataattttgtcagcaataatgtcgtttacgttttcaacagcttttaaaacaccttttccaaggtaacgagctttgtcgccatcgcgtaattctacagcttcgtattcaccagttgaagcaccacttggaactaaagcgcgaccaaacgcaccagcttcagtataaacttcaacctcaacagttgggttaccacgggaatctaagacttcgcgagcataaacttcagtaataatagacatttataattctctcctttgttgggattaattgattgaaatgaacataatattcacttcaaattcaaagacccatccgtttttaaattcgtatttattgtagctctgtttgcaaaaaaactaaagtaataactaaaattatttttgaattaaactttcgcctgtcatttcggcaggttttttaacgccaagcaagtcaagcatagttggcgcaacgtcagccagacgaccaccttcacgaagcgttacaccttttttcgttacaattactggaactggaacggtagtgtgcgcagtgtgcggttttccttctggagtagacattgtttcagagttaccatggtcagcaaagataatagctgaaccacctttttctaaaataaggtctactacacgaccaagattttcatctactgcttcgattgccttaatcgttggctcaagcatacctgagtgcccaaccatatctgggtttgcgaagtttaagatgatcgcatcgtgtttgtcgtttttaatgtcttcaacaagtgcatctgttacttcatatgcgctcatttcaggttgcaaatcgtatgtttctacttttggcgaattgattagaatccggttttcaccagggaattcttcatttcgtccaccattcataaagaatgttacgtgtggatatttttctgtttcagcgatacgcagttgcgataagccttcattagaaagtacttcgccgataacatttttcatttcaattggctcaaaagcaacttcagcatcaatacttgggttgtaaagagtcattgtaacaaatttgatgtttttagggtgatctgccccacggtcgaaatgatcccattctttatcagtgaatgcattagaaagttgaatcgcacggtcaggacggaaattgaagaaaataactgcatcgttgtctttaactgttgcaacaggtttgccatctttagtaatgatagcaggaacaacgaattcatcatttttgtcattagcataagaagctttgacaagttcgattggatcttcaaatttttcaccttcagcgcttacgattgctttgtatgctttttcaacacgttcccagcgtttatcacgatccatcgcgtagaaacgtccagaaacagtagcaatcgcgccatagtttaagtcactaatagctttttgtagtgtttctaaatattctagtgaggattgtggtgccacgtcacgtccatcaaggaatgcatggatataaacgtttttcacgcctttatctttcgcagtttctaaaagtgcaacgaggtgattaatgtgactatgcacgccgccgtctgatagtaaaccgaaaagatgtaagtccgagttgttttcttttgtatgagtgaaagcattgtttagggctttgttctcttggaattcgccttcttcaatagctttgtcaatacgagttaagctttggtagacaatacgtccagctccgatgtttgtatggccaacttcagagttacccatttgaccttctggaaggccaacatcaaggccagcagctttaagttccccgtgaggaaaatcagcccaataacggtcgaaatttggtttgtttgcttgagctacagcattacctactgtttctgcacgtttaccaaaaccatcgaggataataattgctacaggtgatttactcattttattttactgcctccaataatgctaagaacgatgctggttctaagcttgctccacctacaagagcgccgtcaatgtcggactctgcaagataatcagcaatgttttcaggttttacgctaccgccgtattgaatacgaactgcgtctgctgctttttgagatacagcgtcagcaacttctgcacgaataactgcacaagtttcgtttgcatcagcacttgtagaagatttcccagtaccgattgcccaaattggttcataagcaataacagatttgattacttgttcttccgttaatccagcaagagctgcacggatttgaccacgtacccaagtatctgtttgaccagcttcacgttgatctaatgtttcaccacagcaaatgattggtgtcatgccgtgtttgaagattgcatgtgcttttttgttaatatcttcgtctgtttcgtggaagtactcacgacgttcagagtgtccgataataacataagaaacacctaaatcagcaagtgcaaacgggctaatttcgccagtgaaagcaccttcgtcttcaaaataacagttttgtgcagatacacgaagatcagttccttcagtaagacgaactaattcttgtaaaaatagagccggtgcagcaactactgattcaacagcatcgcttgatggcacgttattttttacgtcttctgcaaattgtcctgcttttgcagcagttttgttcattttccagttaccagcaataattggtttacgcatttggataaacatcctctcgatattaaaaattatttttggttcagcttatttgtcgctaatagaagcaacaccaggaagctctttaccttcaagatactctaaagatgcgccgccaccagtggaaatatgtgtgaatttgtcagcaaagcctaagtccatagctgctgctgcggaatccccaccaccgatgattgttgttgcatccgttaagtttgcaatagcttcacaaacgccaattgtacctttagcaaagttgctaagttcgaatacgcccattggaccattccatacaactgttttagcgccttgaagttcttttgtgaataagtcaattgtagcttgaccaatatctagtcccatttcatcagctggaatgctatctgcactcactgtatggaaaggagcatcgttactgaattctttagatacaactgcatcaactggtaatactaatttatcgccagctttttcaagtaagcctttagcaagttcaactttatctgcttctaaaagagatttaccaatttcttgaccttgagctgccatgaaagtgaaagtcattccgccgccgacaagtactttgtctgcttttgtaagtaagttttcgataacaccgattttgtcagaaacttttgcaccacctaggattgctactagtggacgtgctggattatcaactacaccgccgatgaatttaatttctttttccatcaaaaatccggccgctgattctaggttagaagcgattccaacgttagacgcgtgcgcacggtgagcagtaccgaaagcgtcatttacgaaaacatcgccaaggctagcccagtattttccaagttctggatcatttttgctttcttttttaccatcaatatcttcaaaacgtgtattttcaaaaagaagtacttcgccgtcttttaactcgtcaattgctttttcaagttctggaccacgagtagttggaacgaatttcacttcttttccaagtaattcgcttaaacgaaccgctactggacgaagagattttccttctttatcttcttctgtttttacttttccaaggtgagaaaatagaattgctttaccgttttgttctaagatgtactcaattgttggaagtgcagcaacaatacggttgtcgttagtgattttgccgtctttcattggcacgttaaagtcaacacgaactaaaacttttttgtcttttaaatctaaatcagttacaacttttttagccatttagagttcctccattaattttaaaggattggggtcgcccccgttatttcagaaaataagcggaaacaatagtgtctccgcttattcttgttattgctgatgtgactagcacttcagtaaaattaatctgctaattatttagcgatttttgcaaagtattctaaagtacgtactaattgagcagtgtagctcatttcgttatcgtaccaagctacagttttaactaattgttgatcgccaactgtaagaacttttgtttgagtttcgtcaaataatgaaccgaaagtcatacctttgatgtcagaagaaacaacttggtcactagtgtaaccgaatgtttctggatcagaagctgcttccatagctgcatttacttcgtcaacagtaacttttttgtcaagaactgttactaattcagtaagggaaccagttggaactggaacacgttgagcagctccgtctaatttacctttaagtgttggtaatacttcaccgatagctttagcagcaccagttgtattagggataatattttcggcagcagcacgtgcacgacggaagtcaccttttggatgtggagcatctaatgtattttggtcaccagtgtaagcgtgaattgtagtcattagaccttcaacaacaccaaatttgtcttctaaaactttagccataggagctaaacagttagtagtacagcttgcgccagagataactgtttcagttccgtctaatgtttcatggtttacattgtaaacgattgttttcatatcgccagttgctggagcggagataacaacttttttagcgccagctttaatgtgtaattcagctttgtcttgcgctgtgaagaaaccagtacattctagaacgatgtctactcctaggtcaccccatggaagttcttctgggttacggttagctaatactttaacttctttaccgtttactttgaagaaaccatcatgtacttctacttcaccgtcaaaacggccttgagttgtatcatattttaacaggtgagctaacattttagcgtctgttaagtcattgattgcaacaacttcaattccttccacattttgaatacgacggaatgctagacgtccgatacgtccaaaaccattaataccaactttaactgtcataagtcaatttcctccttgaaaatagtgttttttatttcaaaagggtattactcccttttaaaagcgattttgctgctccttcatccgtgattaaaatcgtattttttggagcgcttttcatatacgatttgattgctttggctttcgatgtaccgcctgcaacagcgataatgtgtgggatttgcgctaagtcttcgaattgaagaccgaatgtaggaaccttatgtacaacctcgccctgttcatcaaaataatagccaaatgcttcaccaacagctttacgatggatgattttttcaagtacatcttcgccggtatgtctgcgtttcgccattgcgagcgcgtcacctatgcctaaaataatagcatttgcggattgtactaatcgtaagccttcttgaattgccggttctttcagtaacgaacgataggcttcttcgcctaattgctctggaacatagagaacgcggtgtttcgtgtttgtctttgttgccatcttgtcacaaattgtattcgcttgattgtcaaggtcttcaccaatacctccacgaccgggaacgaaaagtagttctctgccttttgcgaaatcagttgtcatcatttcggcaacagttgccattgtagagccgcccataactgcgacgatgtttcttttttcggtgagcgccatgtctaattgttcaactgccacacgacccatttcttcgcggacccatggagtatcatcgctatcaccttgcactaccaagcattttttgatttgcaatttcttcgctaattgttcttccattgaatgtaaccccgaaagttggttcatgacactttccaaatcgcggaaaacgaccaagccttcttttgtaacggtcattccggaagaagcaatttctactaaaccttgtgctttcaaaaattctacttcaccgcgcaggacgcgttcactcatgcctaacattccggcaagtgtccgtctcccaactggttcagaaaaataaatcgagcgtaggatttggtagcgtttttgcataatcatcaaaacgtcgggcaataactttttctgaatgttaattaagtctgacatttttaattgctcctcatctttggacgcttaatgacccacttagtcatctgacgtcccgttagaactaaaaaaagtagagatagaggcttttacaactttcaagactattaaactagctacttcagcttgttaacaaagtgtctctcaatgtgatttttaccccttctctttctgcttacgctggtgaatctttttttatgttctttaactaccctacgttccctattctaacagtcttggcacaaatcttcaagtgttaagtgggacatttatgaaatattcacctgaaatttacaattaattcttaaactgcaaacttctaaataggctacactagttgttttccacctctctaaaaaatgaaatatgctcttagtgatttttttgttttaaaaagacgtattttgtcccacataccgctcgtgagacaaaatacgtcttttaaaatctttttcttttagaggaagaaggaatatttaactctaaacgatacttcgcgatagctcttcttgaaacttgaatttctttttctgcgagcatatctactattttttgatcggacaatggttttaatttatcttctgctgctacaaattcttgtactaactttttgatagtcgtgcttgagatatcaccgatgttttcgttttcggaagatttcttttgtaaaccggacgcaaagaaacgttttaattcgtatacgccattcgtcgtttccatgtatttcccattcaccgcacggctcactgtggattcatgcacgcctagctcttccgccacttctttcaaggttaatggttgtaaatgcgccgagttatctaggaaataagctttttgatggctgacaatcgcttcaccaactctttgtaaagtactttcgcgttgttcgatgccttttttaatccaatcaaattcgccagctttttcacgtagaaactgggcgacgtctttttcttcagtcgctcgcatcgtttcgtagtatgcttcttggaaacgaacttgcggtagaaattgttttgctagtgaaacagcaaattcatcttcgtgttgaagtaaaattaaatccggaacaacatattggacacgttcggactcaaactcagaacccggcttcggatttaaggtttgaatgtaatccgaaacctcttgaatatcttgcaaactaacatccatttctgaagcgattttcttccattttttctctgcgaattccgtgaaaaatttttggattacatcataggcaatatatggagcatccggcgagcgttcgatttgtagtaaaatacattcgcgcgcatctctggcaccaacgccagctggctccatgctttgcaaaatttctaggccttctaacacactagaatcatccattaaaagcgccgcactaacatctttcaaatctatttgtaaataaccattgtcatttaaactttctattaaatataaaacgataattttttgtgtttgcgttacgtccattaaatgtagttgttcttttagcgcatcggctaaagtcattttgttatcagctatttgttccaaccaatctgtatcatcagaacttccagcgcttttacggctgctgtatgaaaaatctgttgcgaaatccgagcctggaatcacttcaattaatgggttctcgagtgctttatcttctaaaaatgccactaaatcagccgttgcaaattgaagcattgcaatagactgggacaattgttgcgtcatatttaatttctgtgactgcttttgttgttgtttttggacgaaattagattctaaacgcacattaaaacctccattaaaaattcgtctgatatacttataccaaactaaattccatttattgtcttcattataacatgccatttttcaaattacagcagattctctttgttctatttcaaaaaaagtccaagcacttcttacagcgcttgaactttcgtttattttggtaaatggtttaaaaagttgcgcgatgcaaatccttctacctcttcttttgtataatgttttcccagtgtttcaaggaaattttggtatttaccggcgtgttcgaggcctttgacatgatctgggataccatcaaaatctgaaccgaaaccaatgtttttcatcccgccaagctcgcaaatgtgatcaatatgacgaataacatcttctatatcagccacgccatcattggttgtgaaaagtggatggaagattacatgaatcattgcgtcatgctcaatcatcgctttgatttgttcgtcatctaagtttctaggatgggcacaaattgctttggcgcttgaatgactggcaataacaaactcagcttgttccaacgtttcccaaaaagcttttacactcaagtgagaaacatccgtgaatacttttctttcatttaaaagatggataatgtcttttccgaagcgagttagtcctgcaccgcgttcttccataatgccatccgctgccaagttggcgttgttccacgttagtccgacagataatacgccaccatcaagtaattgcgttaatttatctaaatcacgtccaattggttcaatgccttctaacgtcaacatcgcgccaattttatcttcaggtagattttctaaatcacaccattttttcacatgatgaatgattccacctttgtgcagtacgtgttgtttaaaaatattaacttgctcaaccgctttcttccatttatgttcaaccgggatatcttcatcaagaaaaatagcgaatccttgtagtaacattttagcctctataagccgttcaaaattcacatcaagttcttccgcatcttggaaagtgtattttccttttccagcctgcaacttgtaaagcgcatcacagtgggtatcaattactctcattttctgtcgttcctccttttagatacatctattatatacttttcagaggaatagacaagagatttttcaaagacgttttcattttgtcattttatgctgtttacctggccagaatgcccattttccaaggagcacagtaatcgatggaactaggaatgggcggacaatgaacgtatcgagcaagacaccaattgctgtaattaagccaaattgtactaagagctgaattggtagtgtagtcaagactccgaaagttcctgctaaaattaaacctgcagatgtgataaccccaccagtttgtccaactccttctgtaatcgcttttcgaagtggcatcttcttgctgtttttccaaatactagaaatcataaagatattgtaatcttccccgagtgcaacgatgaaaacaaaggcatagagcggaatcaaaccagaaatcgcctccacacccatcgcataatgaatgatgacccaaccgaggccgagcgctccaacgaaggacaagagaactgtagcgactaagtaaagcattgctgtaatcgagcgcaagtagcataaaagtaaaatcgcaatcaaagcgataacaagtggaataatcactttttcatcgtgctctgtcaccgcgcgatcatcatattgtgtcgcagtttgtcccgcaatatatacgtcatttcctttgtcagcggcggcacgtacttttggaacaacatccatcgcttcattgctataagggttatcttttaaaataagtgtatatttttgataacctttgcttcgttctgggccagtaactgaagccactccattcacattttcaagcgaactcttcattgattctttggagttcacaactacttccatcggcgcaagcataccagcaccgaaatgatcactaattaaggtaaatccttcccgagatggcatatcttctgggaacgtcgaaagtgtgtcatacgtatatttcacttgagttgtaaaaatcccacatccaattaaaataatcaaagtgataattaaaattcgtacgggatgtttcgcagacatttccccaattttatgccaaaaacggttttctttgtggtgttttggcgtttttccttttttcttcgcacgtgtttcttccatttctactgttcttgggacaaatggccagaatgatacacgaccgaatattcctagaagcgctgggacaagcgttagcgaagaaatcatcataatgaaaatcgctaaactaaatggtacggcgaaattgtgaaatgaaccatattctgctgctaataatagaagtagtgctgccattacagtcaacccactaagtgcaattgcgcctgctgttccgctaaatgcttctttaaatgcttggaatctgtttttctcagtgtgcagatggctacggaatctggaaattaagaataaacaataatccgtaccagcgccaaatagtaatacggtcattatcgagagcccttgtgagccatatgtgataataccttctttcgcgagcaaaccaagaattggcgtaattactaagtaggcaaaaccaactgcaatcaaaggaattaacgctaaaattggcgaacgataaattactagtaaaaagactaaaacaagtagtactgttccgattagcagcgaaacgtccgcatctttaaatagtccactcgcgtccacgctaataccagccggtcccgttgtccgagcaacaagcgtatcatcagcggatactttctgtgcaaatggatcttctccaattgttgttttagccgctgattcaagttgcttgaagctttctgttagttggtctgaagtcgcgctatctttcataataacggtttgaataaaagtagttccgtctttagaaacttgttgtttgagcgcaacgggtggcattttatcgtaaggaactgccattttttgatagtctactgggttttcggtcaattctttgctgtatttttgaatattaactaagtcttcgtttgttaaacctgttgaacgataccaagtgataagtgctggtaccccgtccgttccagcaaatttgtcatcaatgagcttttgggcgacaacagaaggctctgaattcggtaaatctttcgcggcgtcatctttataatcagctgcttttggaaagaaaaactgtaaaataataattgcgataatccaaatacctaatgttataaaccgacctttcttgccaccaactccactggcaattttacttaaaaatccatctttcattataaatccccctttagtttgcttgttttttcgtttatcattcgataagtgaaacgtcaaaaaaagaagcacgctaatttatacctcttttttacatatgccaaacatcattaagttgattaattcatcgatttgttctgtagtcgtttgcttttgcgcaaagctacctttccctgaaaaaagagggctaatagtggacaaacagtatcttgcagcggtctcagcactgataccattacgcaattcaccagcattttctagacgctcaaaaaattgttgaaatggttctaaataggttttttgccataatttataaagtaaaaattgattctctggtttcatttcattaagaatatcgtgaatcattaatagaatattggtgggatgttcctcaattaacataattaacatatcatgtaattgttcttcttttgctttgttcgtttgcataattggatgcatttccacctggatattttgcgtcaattcacgaaccacttcaatatatagggattctttatcttcaaagtgatgatacagtgccggttgggtaatgttggcaattttagctatttctcttgtagaaactgcccggtaacccttttccataaataaatcacgtgctgtatccaaaatttttcttctagttattcctaattcttctgctcgagtccgcttcttttccatcatcaccccacctttcttattttgttgcagttagtaatggaaggtttttattaatgagcttttctagtgtttctttatgccatttacgtcctagaacacgcttactaacaagatattttccttcctccagctctccttcttcggtcactgcacgaatatataaacgataaaccaatttctttttctcaagtacaatttgctggacagtcttcccatccaaaaagtgcatttccgcgtcacttaatttaaaaacaaacgtaaaaatacccgcttccgtgaacgcgagaacaagcgaatgtctccctcgcatatggggccctgcatataaaaaatcaatcgtttgaacggttaaattattgtcagcactatatgtttttacttcttcttctaatcggtctttcaaactagcagccaaaataagcgcctcccttgctgatttatattttaccagaaaatgacggattgaagtagggaaattttttgttgctaaaaatatgatgaaatcacttccattcacgaaaatgttaaacctgatattcttttcttcttccattcatggtagtatcaatattagcgctcactacatcagtataaacgttcagacgattatataaatattaaaaagaaagttggtacgaagaatgggagaacaaaactacatagaaacacgaaacgggagaacatcattttttgacggaggtttgttacagtatattggttggacaatacttggcactttagtaacactttgcacgtttggcatttgttatccatgggctttatgtatggtctatggctggaaaatcaatcatactgttattgaaggaagacgcttgaaatttcaaggttccgcagtaggtctttttggtcattggatcaaatggcttttactaacgataattactatcggaatttatggtttctgggttttcattaaactagaagattggaaagtaaaaaatacgatttttaattaaaatgaaaaaacatcttacacaatggtttttgccagttgtaagatgttttttcattatgccctcggagggaatcgaacccccattttaagaaccggaatcttacgtgctatccgttgcaccacgagggctatatgtaggccagaaatgcttaccgtacgaataataattatagcgaaattcgtagtgttttacaagttttattttaaatgaaggagccagcgcctccgaagatttgctggctcaagtattaatttaataatgtccaaatggatgaactatcaggcttctcacctcgtacccaccatttcgcttggtatgtttttccgttatacgtaactttatctccgccattataggctttttgaacattccaggtttggatatctgtacttgctgtttgccaaacatcacttgtatctggagtgttaccttttgtccaccattttgctgtataagctactccgttatagtaaacttggtcacctgcattgtaaatttggtccgatttccaggtgttcagtgggtctagcgtttttgttttaatagtgatttcattgcttactaatgaacgattgccagatgtatctactgcataaactttataattatagcttgtattgctggctagttttgtatcttcaaacatggtttttgtggatgttgctatttttgtattattacgataaatttcataatttttcacttctacattatctgttgaggcttgccaacaaagagcaatagttgtatccgtttgaccatgtgacattaaacttttcggtgcagttggtgcttcattatccactgctggcacttcttttgtcgtcacattaatactattgcttaatgtagatttgtttccggcgaaatcttttgcccgaacagtgtaagtgtatgcggtatttgattctacagttgtatcttcataagaagctgtttgactttctccaattactacgccgtcacgtaaaatttcataacctttgattcctacattatcagtagaagcattccaggccaaacttacagtcttagtagtagttgtcgctgctaaatttgtcggtttcgttggcgcttctgtgtcagcaactggtgttatatcagaattaataatatttgcatcaataacttgatagaacgcattacctgtatccgcaatgttccaaacgccaagtattaaatagtatcctgaccgatcatttgggatattaatttcttgttttgctaaagcattaggtacacttccatcagcttcaatcgttgcaagtggctctaacgatgatcttgttagtggtttatttgggtcccaaccttttttagtaataaaatattgccaactgcttgttttgtgtggcgcagtcaacgtccattctacagttaatgggccagattctatatctacttttgcccaacgacttgcagattgctcgtctaacagcgaatatttgcctccccctgcaatactcccgtcagcaggtccacttattggaaaaccttttggagcttccacgctttgtggttcatattgcgctgatccgaccccaacattaatccctttgtttgctaaataaacacggcttgccggttttgatatgtatccatgagctgaagcagttgtttgaaaaagaactacagctaacgtaaacacagcaaaaaacattccaatcttcgtcattttcttcatgatgcaccttcctttcagtatagttcattatacctttttgttaaattttatagaaataattcgcttcagactttatcgtttgacctagtttgaccattcgtgtatgatataaacaaagctaatttaaaatttacatttaacaggaggaatcttgatatgaacttaattccaacagtaattgaacaaactagccgcggtgaacgtgcatatgacatttattcccgtttattaaaagacagaattattatgttaggatctgcaattgatgacaacgtggcgaattccatcgtttctcaattattattcttagatgcacaagatcctgaaaaagatattttcctgtacatcaattctccaggtggaagtatttcagctggtatggccatttacgatacaatgaatttcgttaaagcggacgtacaaacaatcggcatgggtatggcagcttccatgggctcattcttactaacagctggtgcaaatggcaaacgttttgccttgccaaacgctgaaattatgattcaccaaccacttggcggtgctcaaggtcaagcaactgaaatcgagatcgctgctcgccacattttaaaaatcaaagaacgtatgaatacgattatggctgagaaaactggtcaaccatatgaagtcattgctcgcgatacagatcgtgataatttcatgactgcacaagaagcaaaagattacggcttaattgatgatattatcattaataaatctggcttaaaaggctaataaaaaaagaggttttgcacaaaatgcaaaacctctttttttataccttattttatacgcaatgctgaatgttttcttccatagaatgtatacactagtattcctatcacaaaccaaataccgaatgcaatccatgttgttttagataagttaatcattaaatatacacaaagtaaaaaggaaagtgctggtactactggataaaatggcgttttaaatcctttttgattcaagtctggatttctccgtaagaagaaaatcccaatagaaaccatcgcaaaagcaaacaaagtaccaatgttaattaattgtgctaaatctgccatcggtacagtagaagcaattagtcccattactgtcgcaaaaatcatcgtatttctaacaggtgtgtcatttttgctgatttttgagaacgattttggtaataatccgtcacgtcccattgcgaataacaagcgtgtaccaccataagacataacaagtacaaccgttgtcatcccaacaatcgcaccaactgacagtaacccagcaatccagttttgattaattgcttgaagcgcaaaggcaacaggtgcactaacatcaactaaatctgtatatggaacaactcctgttagaactgcagaaagtaaaatataaagaagtgtacagactgccagtgaagaaataattcctattggcatatttttttgtggatttttcacttcttccgcggcacttgatacagcatcaaagccgatataagcaaagaagactgtggaagctcctgtaatgaccccttgtacaccaaacggcaagaacggcgtccaattatcaggtttcacatagaaagctcctactaaaataaataatacaaccaccgcaatttttactaaaaccataatattattcacccgtgtggattcacgaataccgaaactaagtaaaataccaattaccataaccactacaaatgcaagtaaatcaaaataagttcctgcactcgggtcatatgctgaagaaatcgccgttggaatatgtaagtcaaatcctgctagtagactcttcatataagaagaccaaccacttgcgattgctgcaacagccagaccgtattctaaaatcagtgaccaccctaaaatccacgcaacgccttccccgaacacatgataactgtaagtatatgcgctacctgcgactggtaatttagaagcaaattccgaataacataatgccgccaaacagcaagcaattcccgcaataataaaagaaataataattcctggtcccgcaatgacagaagctacctgtcctggaagaataaatatccctcccccaacaaccgctccgactccaagcatcgttaaatcaaacgctcctaacgatttgttcaaatgatgtttatcagtcgctgggttatgaaaactcttttttctgaaaaaagaattaactttcgtcataaaaattcctcctttttaaattccaattttcagttaatttatatgtgtatttttaaactaacttgaaaactattattcatagtaccataaatagattgaaaaatatacaacatttgtagattttcgtacaaaaaaatgttcatatatggtgtaaatattttttcttagttttttcgtgttattctttagacctctaaaaaagaaaggactgaatacattgagaaaagttttaatgtttttaagcacagctttattattagccattctgtcactaagctttactggtttagatctgaaggcaaaagctgcttctgatttatatccactacctgctccaattattgatgttttcccagatgatggattagccaaagatatggctaaaaacttaaacaaagactctgtgaatgatgttattgaccaagatgacttggatgcattaactggtttgggatttgaaacaagtacgattacgaatgattccatgcaattactagaacgtgccatgtttaacaatgtcacagatgtaagtattatggaatttggggctaaactaacggagttccctgatattacaaccatcccacatttaaaaacgttattttttgctgatccacctggaagattaactagaaacttgtcccttccaaactaccaaaattatcctgaaatggataccattacaatgagcggaaataatttaatcggttctatccctgatttcactggaatgcctgctttaaaacagctgtatatgtctgaaatgttaattacaagcgatgaacttcctaattttaataatattcctttacttattacgttggatctaagttctaaccaattgacaactattcctgattttcaaaatataccaaatctcacatttttagatttaaatgcaaatttattaaccaatacacctgattttcaaaatttacctaaattaactgatttaaatttaagacataacaatttaactggtacgatggttaactacaccaacttacctagtttagaatccttaaacttagattacaattttttaactgaactaccgtctaatgtattagataccatctatgttcaaagtcaaaacggagagcttcctgatcaaactattaatcagggcgatacctgtactattgatttacctatttatttccaaatggaagaaactaatatgttagtcagcccagaagttacgggagaatatatcgggattagtgtaatccagcttccgacgacggttaatgaggaaggcaacaccataacagtggatacatccgctctaagtcctggtgagtataaattagatgtctcgtataatcacaattatgctactggaggcgtatgctcttatgattggaatgtaactattaattaatttctactaaaaaagctggaagttcagagtttctgaacttccagcttttttacttatttccacgcgcgtgaatattgttttggtgcttcaattgtttcgcctaattgtttggctgcgtctttagcaaaataaggatttcgtaataattcacgaccaacaataattaaatcagctcgttcattacacaaaatttcttctgcttgttcgcctcgtgtaataagcccaagcgccccagtcgcaatacccgccccgcgacgaatttcatctgcgaatggcacttgataacctgggaaaactggtggagctacattaactaaaccacctgtactaacatcaattagttccacgccatctgctttcatccatttcgcaaaaggaatatgatcttctagttgcaaaccgccatgtgcatagtcagtagcggaaactcgaacgataatcgggccgtcccatacttccttcacggctttaataatatcacttaaaattttatatcgattgccagcaggtccgccgtaattatcttcgcgacgattcgtaattggtgataagaattggtgaattaaataaccatgcgcagcgtgaatctcaatcacatcaaatcccgcttcttttgcacgataagctgcacgtttaaaatcagccacaacctctttaatcgcttctttcgtaagctctactggtttgtctgacttttcatcaaaagcaatagcagaaggagcaactatttcacctggtaatacagcttttcttccagcgtgcgctaattgaattcctgcttttgctccgtgataatgaagtccacctactaattttttcaaagctggaacttgctcgtcattccataaccctaaatcaaattcagaaatccggcctacttcttgaacagccgtagcttctaaaatgacaagccctgtaccaccagcagctctcgagacatagtgtgcaaaatgaaagtctgttgcaatcccgtctttattttctactgaatacatacacattggcgacataacaattctgttttttagcgttacatcttttaatttatattctgaaaataattttgacattctaattcgcatccttttctttttaattaactattactgattttcagccctacttgcgctggtgtttctccgcttctaaggcgctctgcaatctgatctagtttccggagacgatgattaatacctgatttacttacttgacccgttgtcagcatttcgcctagctcttttaaggtaacatcctcattagctatacgaagcgctgcaatctcacgcaatcgttctggtaaagcttctagtccaacggttgattggatatatttgatattatcgatttgcctaacagccgcattaattgtcttgttgagattcgctgtttcgcagtttactagcctgttcaccgaatttcgcatatctcgcataatccgaacatcctcaaaatgaagaagcgcgctagttgctccgataatactcaagaattccgtgattttttccgcttctttcaaataggtaataaaaccatttttccgttcaagcgttcgcgcgttaagatcaaattggttcatcaaagcgcaaattgcctcgttgtgctcctcataaacagaaaaaatttctaaatgataggaagaagtttccggattattaactgatccacttgccaaaaaggctccgcgcaaataagcacgtttggcgcttctcttcttaacaaatcccctatcaatcgatttcgtaaacgtcatcggtggctctagtatccgcaaatcttccaaaatcccccgtgtaccagacttcaatcgaactatataaacattattttttttcagcttcattttgcgacgtacaagaagttcaattggcacttcatataagtctttcagtaattgatacattcgtctagctatagcggcattctctgtttggacatccatgatgactaattgactcgaaaacgagatggcgccattcattcgaataaaagctgcgagttccacttttgcatcgctatcacttacgtccatatgggttaattctttcttggtttccgatgcaaatgacatggcttactcactccttttcattagtttggttaggtaacatcgctaaaagcgcgtccgccaccttttcagcggcatggcgcacaagaccatcctctgtagaaagaaaatcttgataaattgcttctacaccaagttcttccattcctttagcattatgctctacttgcgcaacgtcttctgggaatagaagctcttttggaacagtcgtcgtattaattaacgttttatctataaatgatttccccacatgctcatggataactttaatgtgatccgcatctgagaaaaagtcggtttcgccaatttgcgttaaaatattcgtaatataaactttcggagccttacttgctgtgatttcatcggccaactccgtaagtaatagatttggtaagatacttgtgtataaacttcctggaccaataacaatcaaatcagcctctttcactgcttcgactgctgtcggataaggttttacattttctggttcgatatacacacgattaatatgctttccttgtaacgggataagcgattcaccgtgcacaatagaaccatcttccatttcggcatttaaaataagtggttgatccgttgctggaataactttgccgcggattttcagcaccgttgctagcacattaatcgcatcaacataactatcattcaattgcgataaagccgttaaaatcaaattcccaataacatgtcccgataaatcaccatctaccgcaaaacgatactggaataaatcaacaacacgtggatcgacattggataaagccagcataacattgcgtatatcacctggtggaagcacatccatttgctcgcgaattttaccagaactaccaccatcgtccgctactgtcacgatggccgttagatgaatgtccttctttttaagcccttttaaaataactggaagaccagtccccccaccgattactactactctaggtttcgtttcctttttcatattaacgaccctttctacgtttcatatctcggtgcgaaatcgttgtctcatatttttgttgaattgtcttaccaacaaactctgtcaaggctaccgaacgatgctgtcctccagtacatccaatggcaataactaattgtgtttttccttctcgtttgtaaaaagggagtgtaaacattaatagatctactaacttatctaaaaaggtctgcgtttctggccatttcatcacgtattcataaacatcttcatcaagccctgtcagcggacgcattttgtcaatgtaatgcggattcggtaaaaagcgtacatcaaacactaagtcagcatcaattggaatgccgtatttgaaaccgaacgacatcaattgcacattgaatatatctttatcttcggtttggaattcattgttaattcgttctctgagttcgcgcggtgccatatttgacgtattaataactaactgcgaacgcccttttaaatcgctaagcagttcgcgctctgcattaatcccgtcaagcacagacccattaggctccagtggatggtggcggcgcgtttctttataacgcgaaacaagtaccttatcatcagcctctaaaaagaggattttcgttgttataaaattggtattatctagctcatctagtgctggttcaatggaatcgaaaaactcacggccgcgaaggtccattacgagcgcgattttatccattttatcgctttctttcattaactcccagaatttcggaagtaaacttggcggtaaattatctacacaaaaataaccgagatcttctaaagactgcattgcaactgtttttcctgccccagacatcccagtaatgattactaattttaattgtttagaagccatatctgcctcatcctttcgcacaaataatatctaccttccattttagcacacttcccactagaaaatcccggaaaagtctctaaagcgagtttccgggatttttctttttaagcttcgatatgttgcatcaaatcagctttcactttttctaattttgccgtactttcttctttactttcaccacgaatactaaagtagaatttgattttcggttctgtgcccgatggacgtaaacagaaccatgaaccatcttcaaaataacatttaatgacatctgctgttggtaaatgtatcgcttcagtttttccagtagcaatccaagtcgtttcacttctcaaataatcttccgcacgttctactacgaacccacccatacttgttggcagttgttcacggaagctacttgtaatttctttgatgcgctcagaaccatcttttccacttaacgtaagtgaaacgagatcctcattataataaccaaattcatcataaatttgatctaaatcttctaataaagttctacctgctactttgctaacgagcgccacttcagcaatcgcaagaaccgcttgaatcgcatctttatcacgcgtaaatggcttaaccatataaccattgctttcttcataaccaaattcaaacgtatgcttgccagtttcttcaaagtgcttaatttgttctgcaataaatttgaaaccagttaatacttcaatcatttcagcgccgtaatgtttcgcgatttctgttccaagattacttgttacgatagattttaataccgctgcattagccggcaactcactttgcgctttcttttgttttaataaataatgtaaaataatcgcaccaatttggtttccagataaaacttcgtattctccgtccgcattacgaacagccacgcctaaacggtcagcatccgggtcggttcctactaaaatatccccgccaaacttcttaccatattcaatcgcaagtaaaaaggcttcgcggttttccgggttaggcgattttaccgttccaaaatcgggatcattcacaaattgctcgtcaaccttaacaatattcgtaaagccaacactttcaagcgcaggaacgccaagaattccgccagtaccatgaaggggcgtgaaaacaattttcaaatcctcccctcgttcttgaacaagctctttattgacaataacctcttttaatttttccaaatatggacggtctactttttcactgattacctcaagtaaaccattttcaattaatagctcttggttcgctacttctacagaaaaaatatcctctaccgcgtttatgtattcaattacagcacttgcgcctgttggaggcatttgtccgccatcttcaccataaatcttgtagccattgtattctggcggattatggctagctgtgataacaattccaccaaacgcatttaaatgacgcactgcaaaagaaagttccggtgttggtcgaagcgcatcaaaaacataacttttcacaccatgatgccctaatactgccgccgattcaaaagcaaattcacgcgacatatgacgaggatcatacgcaataactatcccacgttttttagcctcttccccgttctccgccacaaattgcgccaaacctagagaagccttacgaatagtatagatattcatacggtttgttccagcacctagtacgccacgcatcccagcagttccaaattccatattacgataaaaactatcttcaagttctttttcatttgtctccatattcgttaattgttttcttaatgtgctatctaatttgtcattagcaacccatttttgatattcttcttgccaattcattctctacactccttcatttagaactctttaattaaaatttatcagctctccactgtgaaacgaaaagctgttctagatgtaaaaggtttttctggtcgaagtacaatatcaccaaatccctcatggttaatcgcatccaccaaaccctgtgtttccattgttatgccagcatattttggcacagctcgctcgtcaatctcaaaagagccatccaaactattcgccgtataaattaataccgagtcagctttggtttccatttccaagcgccgtcctgactttggatcaaacaaaactgcatctggacgaccattttcatgttttaaaatgaacgtatgatccagccccgcaccaactaattttacttgctggtcctgactttgtgtaatctccgctacttcacgacctgcacgcaaatcaaagatagtattttccgctaaccgcttttccccaattgggaggaactcttcatcaattggtaggaagctatcactattgacccaaagctgatgttgtaaaaccgttgaaccagcttctccgctcagattaaaataaatatgattgctcgggttatatatagtcggctgattgcttctcgcttcataatcaaccagccattcatttttattatttaacgtatatgtcatttttgcatcaatttttcctggatagccattttctccatccgcccagcagtattcaaaagtcatcacaatttgatcaagacttttttctactgaaacatcccaaagcttcttactaaaattgaatttcccaccgtgacgatggttagagccttcattttgaatcagttgaaattgtttgccatccaaactaaattgcccatttgtaatacgtccagcaacagggccaagtgtcgcgccgaagtaaggagagtgtgccaaataatcatctaaatttgtaaaaccaagactaatattcgcaaaatcaccaaatttatcttttgtttcaagtgaagtaacaatcgctccgtaatttaaaacactcatgcgcatatcatgatcatttatcatcgtccacttccaaacagtttctccttcaaactccccaaatcgctccttcattacttcgataaaaatcacattccttcataagttattaatagccatttggatgagatacgtgccatttccaagcagtggcgataatatcttttacatctgtataagttggctcccaaccaagaatttcgcgcgctttatcactagaagcaattaacgttcctgggtctcctgcacgacgtggtactacttcagcagggatttcttttcctgttacagtacgagctgcttcaagcatttctttcacagaaaaaccgttactgctaccaagattgaaaatattactttctcccccatttttcaagtattctagcgctctaatatgtgcgtctattaaatcttctacttgtacatagtcacgaatacaagtaccatctggtgtattatagtcatcaccgtagatcgctaatttttctcgttgaccaagcgcaacttgtaaaataattggcactagatgcgattctggtttgtgatcttccccaatcgaaccatctgcttttgcaccagcgacattaaaataacggagtgcaacaaatttcatgccgtatgctttatcgcaccatttcatcattttttccatgattagctttgtttcgccataagtactttccggatttgttggcatatcttccgtaattggcacgcgttctggttcaccgtatgtagccgcactggaagaaaagacgatatgcttcacatcaaattcctccatcacttctaaaacgatttgcgtaccatagacattattatttaaataatccagcggtacttccatcgattctcctacaagtgaactagcagcaaaatgaatcacaccatctactttttctttttcaaaaactgaacttaaaaatgctttatcacgaatatctccttcataaaattttgcctttttatgaatggattccctatgccctgttcttaaattatcaataactactacttcatatccgcgagtaattaactcatctactgcatgtgaaccgatatagccagcgccaccaagtacagcaatacccattacttatctctcctaacgcttgtctttgtatttcattttacactactctggtctatatagtcacgcaaaaatgggtctaagataaataatctcagacccattcgagttttctttactattatttagccgcctcagcttctagcgactcttttaattcttctacatatttttgagcattttgtccagcaagtccgccgtcgcctgtagctgttacaatttggcgtaagcttttcgcacgaacatcacctgctgcaaaaataccaggaagatttgtacgcatttcttcgtccgttacgatgtatccttcatcatctgtaatacctaaatttaagaatgctttcgtaagtggaacaagtccaacatagatgaaaacgccatctactggcataatcgattcggagccatccacagtagaaacaagttttgctcctgttacttttttaccatcgccaacaatttcttctactgtactattccaaatgaaatcaactttttcatctttaaaagcacgatcttgtaaaatttgttgtgctcgcaatttatcacgacggtgtacaatggttactttatctgcataacgagtcaagtaggttccttcttccactgcagagtctccgccgccaaccacaattaattcgcgatttttgaagaatgctccgtcacagactgcgcagtaagaaacaccacgtccactaagttcttcttcaccagccgcgccaagtttacggtgttcagctccagtcgcaataataattgcccgagccttgtaggttttcgacccagctgttactgttttaaattctttaccgtcaacaacttctttaatatcaccataagcatactcagctccaaattgtttcgcaccactaagcatcttgtcggacaaatctggtcctaaaatgctatcaaatcctgggtaattttctacctcagctgtgttaaccatttgtccaccgggtacaccgcgttcaatcattaacgtatctaaatctgcacgggaagtatataaagctgctgtcattccagcaggccccgccccaataataatcacatcataaattttttcttcactagccattctttttgccctcctcgtttatgtgtatacaatagttagcctaaattaatcctaatacggaatagcaaaaaggtctatttatctgctcaggactcgctcaatatctcgcgcacatttactacattcaaattcttctactaattgaagcttcaaatgaggtaaaaacagcttagcaattgcactagccacagtttctatcgtataacgaccaagtattaaatctttcccagcatctattaaaactaacgaaaacatctgcttatataaggccatatattcttcatttaacaaaataccattttcttttaaaataatcatcgcttttgcaatcagataaccattttgttcaatagccccatccggaaaataatcaaaattagtaaacattaaatgctccatgtaagaccaatcgctcatatcaagtaatggatggaataatactaactccggacgatttccagaaatagtcaatgcataaacacctagcatatgagtcaaatcgtcttcctcttgaagcatctcaagcacaagtcgcgtgtcattcgttaaatcgggctcttgctcccacggaaacctaacatcctcatacaaatcacactctaaaaaagaatgccaaaacattttggccccttcaacatcacctaaatagtaggaagatttcgcacggaaataataatatttactacgctcagtcacttccaagtcggccacttgttcaagcaaatcatccgcttcctcgtattcacccatcatcgcatgaatcagaccaagcttctctttatgatgcgctagaaccggtaggacatcccgaagttcaagataaagctcatcagcctctttacggttccctttataaaagtgataaataaataaatcacaaatacccaagagattccccggatttctcgataataaatcacttaaaactctgactccctcttcttctttcagttgctcaaaataaagcgaagcgagttgattataagcaggccaaaaattcggtttttcatcaatgacttttcttaaaatatcgcaagcagatgcactatcttcttctgctaaataacggttaatttcttttttataagaatagaattcttgttctaatttagaaaagccattttcaattgtctcaccaaaaggcgtttcttctaataaaacttcaattaaatctttagcttcctcggtatattcaccatcagttgaactatccaaataacgattagcatattgtaatgctctccgataatctttcatatacgcaaaattattagcaataaaataataacagtattccatgttcccattacgctgttctaaaacttctctaagtagctgattcgatttatggaattgacctatttctgtataacatatcgccagctgacaaagaataacagcttctcctggttccagttcggatgcccgcactaaatacctgattgcttctttaattctttgatcacgaaacgcttccacaccgcgttcaaaataaaactgaccatttggataaaatggatagatttttgcgggtatttttttgtctttttccattttttccacctccaacatacctttatcctaatgagtataacatagaatttatgactttgggcgacaaaaaaagctactttaacttttacgtcagagtagctttttcttttattattaatggatttccataagcaaaactaccagccgggacatccaccgagacaaccgccccagcagcaatcaccgctccatctccaattactgtgcccgggagaatggtgacattcgcgccaaccatcacatcccgaccaatcacaacttccccaacacgatactccgaaagtaaatattcatgcgtcaagatagttgtgtgatacccaataattgagttttcgccaatcaaaatcttttccggaaaaaacaaatccggcataactttataggcaatggcagtcttctcgccaatttccattccaagacagacacgataaattttacgtttaccgcccatccatggaaaaaaacgaccaaattctattactagcgtattcttcaaaaccttccaaaaagaaatcgttttatacacttgaaaaagggtgttgactgtatcatcgggtgcattaaacctatccagccgcctcaaaatttattcctcgtccctaacaattgcgagtaaatcgctcattttttctaacatgaaatctggctggaactgagccaaatgttctggccctttaattgcccaggctacaccagcagttagcgtttccgcatttttcccagcttcaatatcatgataattatcaccaatcataatcgcttcttcttttgtcgcatttaataaagaaagagccatctcaataccttcaggatctggtttagcattagacacttgatctaatccaatcaccacttggaaaaatttatccaagccagtcaccttaagacctcgcataatcgtatcatacattttcgttgatacaataccaagtttataatcttcttcatataaagcacgaatcgcttcataaactccatcatattctaaaattaaatcatcatgatgcttcaaattgtattctcggtaaaaagcgcgcatctcatctgcatgcgctggatttatttcccggaaagtctccattaaagaaggcccgataaacggtaaaatatcctctctagtaaaaacgcggtccggcaaaaactcttgtaacgtcacttgaaatgttttaataatcaattcattcgtatttataagcgtaccatctaagtcaaacaacaatgtagtaattttcccagtcataatttcttcctttcttaatcaaactcgaaaatctccaacttttttatttctttttaactactttaccaaatttatcttccatataatatggcggattcattttcaaacgacgatagataatgatgccaatagacagaacaataagaagtaaagatagcgcttgcgaaactctaaagtcaccccacattaagctatctgtccgcattccttcaataaagaatctcccaaatgaataccaaattacatagccaagaaataactccccacggcgaatttttgtacgacgaataattaatagaataacaaatccaagtacattccacaaactctcatataagaaagtcggctgataataagcaccatctatgtacatctggttgataataaagtctggtaaatgaaggctctccagaaaagaacgcgttgtttctgcaccatgagcttcttggttcatgaagtttccccaacgcccgattgcctgcgcaataatcaaacttggcgcaacaacatctgcaagttgccagaacgaaattttcttaatccgggagaaaataattgccgttaaaactgcaccaattagcgcaccataaatagcaatacctccgtgccatattttcactatttcgcctaaattattcttatagaaatcccactcaaaaataacatagtaaattcgagcactaataattgaaattggaattgcccaaatcagcaaatccacaataatttctttatccattttgcgcttgtttgcttcacttaaagcaagaagtaacgcgatgacaacagccgaagcaataataactccgtaccatttcacagatatactaccaatttgtatcgccaccggatcaagtggctgaacaccattacccataattcccctactttcaaaaagacaactccgcatccaaacaagcatttttgtaaagtttggccgcggagatgctttcactatttatttaatcattcatactgctattatgacctattaaattattcaggtcttgtgtaaattgctctgccgcattgtatcccatattttttaatcggaaattcattgccgctacctcaataataacagataaatttcgtcctggtcgaacaggaaccgtaatttttggaatatccatatcaaagatttttgtcttttcttggtctaatccgacacgatcataatgcttatcaggatcccaattttcaaggtgcacaacgatagtaatttttttactggaacggacagctcctgctccaaataaagtcattacattaataatcccaagcccacgaatctcgagtaaatgttcgataatcgccggagaagaaccaatcaacgtcatttcatcctcttggcgaatttccacattatcatctgctacaagtctatgcccgcgttttacaagctccagtgctgtttcacttttaccaacaccactgcttcctgtaatcaacacacctaaaccatatatatccactaaaacaccatgcattgaaataactggcgcaagtctgctttctaagtaattcgtaatataaacagataaacgtgtcgttttaagtcgtgaacgtaataccggaatatcggcttctttcgctgctgctactaattctttcggtacttctaaatttctagaaatcacaaaagcaggagtccgcttcgtacacatttgtttatatcttttaagacgttcttcgggttccattccttcagaaaacgatatttcagtcatgccaaaaagttgcacacgatcttctggataataagagaaaaaccctgtaagttccagccctggccgagataagtcacttgttgaaattggccgttcaagtcccgtttccgaacaaattagctctaaattaagtcgttcctttaaatcctttaccgtaaccgattttgtcatgcaagtacctccaaatgaattataaaagtccattactgttcgctacaaaatattatttagaaagctccttctcattttagcactttagaaggaatcaagctacctctttcttctcaaatggctctacatagcaaaaccagctacatttgaaagacttattttagccttgaaatgtagctggaatgtttaattttctttgttaccccataaaacggaattaataatcatgtttgcgaatgccataattgctgcgagaattaacgctgttccaaaaccatcaatttggaaagaatctccaataaagaaggtggtcatctcaagcataatcgcattgacaacgaaggtgaaaagtccaagtgtgaaaatattaattggtaatgttaaaaggagtaaaataggtctaattagcatatttagaattgctaatataaaactcgctagtagcgctgtcgtgaacccatctacatgaaaacttgtaaagaatcctgataaagctacgaaaagtaccgagttaattattacgcctataatccaacgcatgttttagttcactcccattctgattcaggtgttgctttcggaataatgatagcagctatgatataaagtaaaattccagtaccgaagaatagaactgctccagcccaaagtaaacggatgatggttacttcaattccaaagtactcagcaagtccaccacagacaccggcaatcattttttgtgatgaagatttatataactttttcattgttttcccttcctttcattttattaaacgttttttgtttcgagttcagaaaccttgataattccatttcctacttttgcttgaagtgtcgccatgcttatttcttctgcattttgagtgaaaacaaaagttctatctgcatcgtcccaaatttttgcattttttaagtcaaaatagattttttcttttttagttccaagtgttccatcaacattccatgttggcggaatttgaattcgaatatcaccatttggtgcctctaaatctgcggccgaggaagtatcattttcaagtatatactcaacgtcaccttgtgctgctttagcaatcgttgtaagaaagctaccttgaagcgcaatatctcctttagcagtagacatgtctacattctctactgtgctgcgtttgaagaagatttctccatccgctgactctgtactcaaaaatttaccactagctcctgatgaacgaatatcaccgtgacgtgttttaataatagcatcttcagcagccgtatcgtcatatttcaaattaccgtttaagagctgaattttcacttgctcatataaacgttttggaatagtgataactaaatcggtttttaaaagttcgttttttgattcgaaagtgaaattgtccggagaaatatcaagcatcgtttgactaaagaagtaatcccatagtttttcctcacttaattgacgaatagaacgcgctttttcatgtacagccagtactgcgcggattttcatttgttctttgtcccaagaacggatgataacgtccccggtcgccactctaatagtaaaggaacggaaagtcgcattatcaaaattgaattctcgtactgggcgagggcgtgcttctttcttccttgcgccgtgatgaatcggttcggcattttctggtctttgtcttctatgatgatgactatttctcattgcttctcgcacttcctgtctagcttgattacgtcctgcgtggcgatttcttttttcttccacacggcgacgatgccgttcaagcacttcttcattacttgtatcagaagaaggaatcacaaacaaggctactatataagcgataatcgcaataccggttttcatcgtaataatggtgatgataatataaataagtcgcagaagtgtggcatctatccctagaaactcagctagtccaccaaacacaccgccgactttccggtccactcttgatcttcttaattttttttccatgttagctcttcctttcttatatctatgtaaaatctagcgcgcttgcacggcgctagatttcgtttaattattttacatcgcgaatttttacagaaccagttgttgcttctgcttcaattttcaaggaagaatcagctgcattcggtagtttagtgaaagtaatcgatttacttacagactctgttttagattcaagaatttctgcatctttcaaatctaaaagtaatttacctaagtttgtgtggaaacgtccatctactccaattgttgctggtacaactacgtcgatattccctgcaccagtttttgcttttaagaaagtagcttcatttccagttagttgataatttacattaccatttttagtttgtaagttagtggaatagtaattaccttttactgccacgttaccgttgaatgttttcagggcaacatcacgaatttcaccattttgaatacggacgttaccattaattgactcgatttctgctaaagtagcatttaaagtaccaatactgatattaccattggtggttttcacaaataaatcacgaccggataattcatccatgtggaagttaccattaagcattttaacagaaacataatcgtactcacgacgaggcaagtatacagttaagtttgtaacgatttgttttgatttagactcaaaacgtaaagtttcttcatctacacgtaaagtcgttttatcaaagaagattttaagtgcttcatcttctggatattctttgaatagtttaatcatcgcgtgaactttgatatcgttcgaatcggatggtttaaattcaatattaccattagcaatttcgaattctaaaatagaaagtgttgtgtcatgataaatgaaatcacgttcgattttcgttgaagttaagaacgggaatggcatatctttcacttgtttaaatgcactatttaggaaagaaccgattttttcaccagcttgggataaatcattaaccatattgcgcatggagtcttcacgatctttagaagaattttcgccgccttcttcttcatctctttcatgattttctggagtcggttctgggcgtcttttacgactttttggaggtgtataaggatttccttgattgttccaacctttactgtaatcatatgatggttcttcttttgtttcttcttcgatttgttcttcttctctcggagctgcagatcgacgaatattttcttttgctgctgttttaccttcttttttggaaatattttcaagtagagtaagggcttcttcagtggatataataccttgttttactaattcgagaatacgtttacgttcattttccattttcatttcctcctataatttaggctaaactattttaggcttgctttcacatgcaagtgacatatctgttttatctatgactctattatgaaggaaaatataatttctgtcatacaaccagaggatgattatttgtttggactttgggtggtttggtcttaagaatcacgaaaaatcccgcttatattttgaataagcgggattttgattattttttcttagctgttgcaattcgttcttccgtgcgttctttatcgcgttctaaaattggtttcaagtatttacctgtataagatttttttgagcgagcgattttttcaggtgtgccggttgcaataatttgaccgccaccatcgccaccttctggacctaaatcaatcaagtaatcagcttgtttgataacgtcaagattatgctcaataacaagtactgtatcgccattctcttctacaagtctttgtaatactttgagtaaacgaccaatatcatctgcgtggagtccggtagttggttcatccagaatatagaaagattttccgttactacgtttatgaagttccgaagctagtttgacgcgctgcgcttcaccacctgaaagcgtagttgcaggttgtccaagtcgaatatagccaagaccaacatctacaattgtttgaagtttacgcgcaattcttggttggttggtgaaatattctagtccttcctctacagtcatttctaatacttcagcaatatttttgcctttataacgaatatctaacgtctcaccattgtatcgttttccatgacaaacttcacagggtacatatacatcaggcaagaaatgcatttcaattttgatgattccgtcgcctttacacgcctcgcaacggccaccttttacgttaaaactaaagcgaccttttttataaccacgaactttggcttcattagtacttgcgaaaaggtcacgaatatcatcgaaagctcctgtataagtagctggattcgatctcggtgttcttccgattggtgattggtcaatattgataattttttctaggttttcgatgccttttatttctttgtgttcacctggttttgcgtggtttctatttagttttctcgctaacgcttttcgcagtacttcattcactaacgaacttttacctgaacctgaaactccagttacacaggaaaaagtagctagtggaatttttgcatttacgtttttgagattatttgctttagcaccaataatttctaattctagtccgttaccttttctacgtttagcagggactggaataaattttttacctgaaagatagtcaccagtgatggaatttttattattggcaacttcttctggtgttccggctgcaacaattcgtccgccgtgttctcctgcacctggaccaatatcaataagataatctgcggccatcatcgtatcttcgtcatgctcaacgacaataagcgtgtttccaatgtcacgcatactttggagtgtgctgattaaacgatcattatctcgttgatgaagaccgatggaaggttcatctaaaatataaagtacaccagtaagtctggaaccgatttgtgtagcaagtcgaattcgttgcgcttcgccaccagaaagcgtcccagctgcacggctcattgttaggtagtcgagcccaacattttttaagaagcctagtctagcacgaacttctttgaaaattggcgctgcaatttgtgtttctttttcagatagttctaagccatcgaagaaagcaagtgcttcattaatagaaaactcactgatttgcccaatatgatggtcgtttactttaacggaaagtgtttcttcttttagacgatagcctttacaagatggacatggtaaatcagtcatatattgcgccatttgatcgcgtgtgaaatcggaatttgtttcacgatagcgacgttcgatatttggaagtatcccttcaaacggaatccacgtttcgcgtgtcataccgaaatcatttttgtattcgaagtagaattctttatcttttgatccatttaaaataatatctaattcttctttggatagcttctcaagaggtgtatccatatctattccaaattctttacaggcagaagctagcatttgcgggtagtactgtgaactaattgggcgccaaggaataatagcaccttcatttagagacatacttctatcaggaataaccgtgtcgacatcgacttcaagtttagtcccaagtccatcacatgtggggcaagcgccaaatgggctgttgaaagagaacattcttggttctaattcaccaacggaaaaaccacaataagggcacgcatagtgttcactaaataataattctttatcccccattatatcaacaaccgcataaccatcagctaaacgaagagcagcttcaatggaatcatacagacgagtattgatgccctctttaatcacaatgcgatcaataatgatttcaatagaatgctttttgtttttctcaatttcaatttcgtcattgatatcataaatttctccatcaacacgaattcgaacatatccttcttttttgatttcctcaatagttttcttatgtgtcccttttttaccagaaacgattggagccattatttgaatacgtgttttttctgggtattctagaacacgatctaccatttgttcgattgtttgagaagtgatttcaataccgtgatttggacaaaccggatgcccaacacgagcataaagtaagcgcaaatagtcatggatttctgtaactgtcccaacagtggaacgtggattacggcttgttgttttttgatcaatcgaaatggcagggcttaatccttcaattaaatccacatctggtttatccatttgccctaaaaattggcgtgcatatgcggacaaagactctacataacgtctttgtccttctgcataaatcgtatcaaaagcaagcgaagatttacctgaacctgaaagcccagtcataactactaatttgtctctaggaatctctacatcaatgttttttaagttatgggctcttgcaccctgaattactattttctctttatccaatttcgcttcatccttccgcttttatttccagtaaagcatcgcgaagttcagcagcacgttcgaaatcaagtgctttagctgcttctttcatttcatgttccataccttcaatgaatacatcgcgttctttcttagacattttgcttaaatcatgttgcttcactgcttctctttcatctgcggcagaagtcgctgcgatgataccacgaatttcttttttgattgtttttggcgtaatgccgtgtttttcattatattcaatttggattttacgacggcgttctgtttcgccaatagaattgcgcatcgaatcggtcattttatcagcatacatgattactcgaccgttttcattacgagcagctcgacccattgtttgaattaaggaacgctcggaacgaaggaatccttctttgtccgcatctaaaatagcgacaagagatacttcaggtaaatcgattccttcacgaagtaagttaattccaacgataacatcatacacaccaagtcgaaggtcacgaatgatttcgattcgctcgagcgtcttcacttccgagtggagatactgtactttaacaccagcttctttgagatagttggttaaatcctcggacatttttttcgttaaggtggtgattaaaacacgttcatttttctcgacgcgatcgttaatctcatccattaagtcatcaatttgtccttgaatcggacggatttctacgattgggtctagcaagccagttggtcgaatgatttgttcaatgacatctggatttttttctaattcgtaagggcctggtgtagcggatataaacataatttgattgatatgcttctcaaattcttctaaacgaagcggcctattatctagagcgctaggcaatctaaagccatgatcaactagcatttgttttctggcttggtccccgttaaacataccacgaatttgcggcatcgtaacgtgtgactcatcaattaccatttggaaatcatctgggaagtaatcgagtaacgtgtatggtgtaactcccgctggacgaagggataaatgtctagaatagttctcaataccagagcaatagcccatttcttccatcatttccaaatcataattcgttcgctgttcaaggcgctgagcttctagcaatttattatctgcacgtaaaactttaagacggtcttcgagttcagcttttatattaacaattgcttttttcataatatcaggtctggtgacaaagtgagatgccgggaaaatggaaacatgttctctttctcctataatttcaccagtaagtgcatctacttctctaattcgttcaatttcatcaccgaaaaattcaatccgcatacagtgttcatctcttgaagctgggaaaatttcgacaacatcaccgcgaacacggaagcgtccacgttgaaaatctatatcatttcgatcatattgaatatctactaatttgcgcagtagctgatcacggctaatttccatgccaacacgaagcgaaacgagcatctctccatattcaatcggcgaacctaagccatagatacacgatacactcgcaatgataattacatcgcgacgttcaaaaagcgcagcagtagcagagtgacgaagcttatcgatttcatcattgatacttgcatctttttcgatatatgtgtcactttgcggaacataggcttctggttgatagtaatcatagtaactgacaaaatattctacagcgttatttgggaaaaactctttaaactcgctatacagctgtcccgctaacgtcttattgtgagccatgacaagtgtcggcttatttacttcttgaatcacattggatacggtaaaagttttccctgtaccggttgcaccaagtaaagtttggtgtttcaagcctttttttaatcccgcaactaattgttctatcgctctaggttggtctccttgtgggctatacttagaaactaactcaaatttatccttcaactcggattccccctattctgtatctgtccgattctggtatctgaaaagctttgtttgtaaaaggtctagcaaagcaaaaagcggatttttcagatccgttaatgtttctattttatcataaatattttaattagcctagcaaaaaccgaacatattttcgcatttgttgaaaaataaaaaacgcaacctgttgattacgcttttctttattttatcacttttacgcttttctacctatatatttgctttgttaaaaatcactgccactcttctttaaacgtcgcagcatatacgttgcaagcacaaaaccaatggtcatcgaaaaagcatcaataataattagccacatagaactcgtataacctaacttggcagaagcagcaatcaaaatcaccatcaaaagcaagccgacataacgattataagtgattctcgcaaaaagaataacaaggaggcaagggaaaataagcgcagatataatttgatccatcttacgttcctcccccttttttatgcgtctcgtaatgctttggtcgttatttccgttgtaagctgtggtaattctgttttttcgatacctttttcagcaagcatatctggtaaaatttcttttaaaaagtacttaacgctcgccatttctcggtactcataaatggttgcaagtgcctcactatagatttccacaaaaatattttctggatttcctttttgaatttcgccaaaggattcatataacaaatctactttatcagaaattgcgaggattttcccttccaacgtactgtccttaccttcttttagcaaatgacgataaatcggctggtacgtttctggaatttcccgttcaataaagttttttgtcatgctttcttccacttcggaaagcatttcgcggagttctgtcgttgcatatttcacaggcgttttaatatccccgatgaaaagctctgaataatcgtggtttagcgctttttcgtatagcgcacgccaattcacttcattcccagcttcttcctctacagcgccgaaaaattgagcaatggaagtaactttatatgaatgttctgcaacagagtgctcttgatatttaaattttcctgggcaacgataaatgttttctaaatctgataaactttggaaatattgatgaattcccatattatccctccattcttcgttttattcttcacgtttttgttttttattggccggattagtgttttcgatttcacgcatcatcagcgccgcagcataaccaattaaagcaatcatagcggctgagtaagttctgaagttatcggtagcaaagataaaaataattgctgaaaataaaagtgtcgtcagtattccccagctaaacagctttgtcccgcgagctgtccctactttcatatgtgaataaatcccgacataacaaacgagctgaatcataataaattgcacgatagataatccgatgactaccgtaagattgttattccatattactgctaaaatcgcaataatagtcattacaataattcctgtaataacaataaatttctgcattggtgataatttcttcaaaatacttcctccaagcttttatttgttacttactttaccataatctctgtttaattgggataaaaaacacccatcattcctaaaaaggttttctgagcgtcccacttaatgatggtgcacgtgtcgaattgcttgcgtaagtaattctaatacgtgattatcatcttgcatataataaatcgtcgttccttcacgtcttgatttcacaagtcttaaattttttaaaaaacgcaactggtgcgaaactgttgtctggttaaacgcaagtgtccgcgcaatttcattcacagagtactcgcggtcctgaagcaaatttaaaatttgcacacgtgttggatcagaaagcgccttaaaaatctgcgtgacactaaatagcgtttcttcatctaaaggttgttttgcgttttccattgaatatcactccattttccatatatgttcatatactcatatgatacttaaataggaatgattccgcaagtttaacaacatctctactaaaaaatgattaaatatgagcaaaaacaagattttctctgtttcaatgatataatttttttatcattaagaaaggagagctggggaataaaagggttttaaatattgagaagttatttaaaccgcctaacacaccaaaaagagcccgattaacctgtggaaaggaaaatcgggctttttttatctgtttaaatcttcaatttcgccactcttcaagtaaacaatccattcgcacacatttgttacatagtcaccaatacgttcgatatactgggaaactaagagtagttgggaaacatcttctatatgctctggctcttcttgcatgaaatgaatacatttttgataaacgattttatgaagcttatcgacttcattatctcgctcagcaatttcgcgagctgcaccttcatcttctgcaaggtaagcttttaatacatcttgcaacattgattttacaatttctcccatttctggtatttcaggaattggctttaaaactttactttcgccaattaaaatagctgttttagcaatacttactgcgtggtcaccaatgcgttctaaatccgaacttgtttttagtaccgtgacgatttttcgcaaatccataccaactggctgttgcaaagcgatcagctcaaaagagcgttgttccagtgaaagctccatgttattgattgctttatcttctgcgactacttgtttagcaagctcggtatcgcggtgtacaagtgacttgactgctttaaaaatagcttcatttgcaagcattcccatttccattagatgttggtgcaagtcgtttaactgttccgtaaaaatttttctgactaccataataacactcctttatccaaatcttcctgaaatataatcttctgtttccttttctgctgggttggtaaaaatactcgtcgtatccgcgaactccacgatgcgaccgtttaagaaaaaggcagtttcatcggaaatccgggatgcttgttgcatattatgcgtcacaatgacaatcgtatagtctttctttaattctaaaattaaatcttctacttttgctgtcgaaattgggtctagtgccgaagttggctcatccatcaagataacatccggcttaacagctagaactcgtgcgatgcaaagtcgctgctgttgtccacctgacatcccaatcgccgaacgatccagcctatcatgcacttcttcccaaagagccgcttgacgcaaacttctttctacaatctcatcaagtacttttttgtcttttataccatgcatccgcggaccataagcaacattatcataaatcgaaaacgggaacgggttcgcttgttggaaaaccatacccactttttttcgtaagttaaccatgtcaattttaggatcttgcacattttcgccgccaatatggatttctccggtcgttttcacattgggaattaaatcgttcattcggttaagcgttcgcaggaaagtagatttcccacaccccgatggaccaattaaggcggtcacttgattctttttaatatttaaagcaattttttgtagtgcttgtttggaaccataaaataaatctacatcttttgtttcaatgatatactctactttttcagcagtttcggttgtcataaaaaagctcctttctagccaaagttaccagaaatatagtcttcggtttgtttttcttgtggattcgtaaatagttcggatgttcctgagaattccacgacttctcctagataaaagaaagaagtatagtctgaaacccgagctgcttgttgcatattgtgcgttacgataatgatggtatatttattttttaactcattaattaaatcttcaattttacttgtggaaattggatctagcgcagatgctggttcatcgagtagcaatactttaggttgcattgcgacagctctagcgatacaaagtcgttgttgttgcccaccggaaagggatagcgcactttttcctaaatcatcttttacttcgtcccaaagagccgcacgacgcaaacttttttcaactcgttccatgatttcttttttgttcttcatgccatggcgtttaagtccaaaagcaacattttcatagatagatttcgtgaatgggttaggtttttggaacaccatgcctatttctttacgaacattgtataaatcaacttctttgcggttgatattaatgccgtcgtataaaatttgtccttccatacgacaaccgtcaatttcatcattcattcggtttaatgctcttagataagttgatttcccgcaaccagatggtccgattaaagctgttactttattttcggggaacgttaaatcgacgcctttaattgcatgattgtccccatagtatacgtgcaaatcctctgtcgccattgcagcaggaagtgaatgaggatctggtgttacttgtaaaattgtattaatttcaggtttcttcgttaacatcatttaaaatctccttttcctggctttttacgacgaggtcatgcgtttataaacaaactttccaagcaaacgagctaggacattgaaaagtaatacggaaagaattaataccgcagaagctccgtcagaaacagcttgggcatctggcataattccctcaccattaattttccaaatatgaacagctaaagtttctgctgggcggaaaatatttaacggtgaagctggattgaccgggttccagtcagtgaaatcaagaataggtgtgctttgacctgctgtgaaaataagcgccgctgcttcaccaaatacccgtcctgctgctaaaataacgccggtaataatggcaggaagcgcggctggaacaagtactcgagttatggtttcccatctggataaaccgagagcaagtcctgcctcacgctgcgtgtttggaatagcatttagcgcctcttccacaacacgaattaatagtggtaaattgaaaatcgttagtgtaagcgccccagaaataacggagaagctccaccccatttgaataacaaaaacaaggaaaccgaatagccctacgacaatagacggaagtgaggaaagcacttcaatcgttgtgcgaattaaatctgtaatccaatttttacgcgcgtattctgccatatagattcccgcaccgagcgagataggaacagaaattatcatcgtgataacgagcatataaaatgaattccaaatttcaggaccgattccaccgccagcttggaacgactgtggtggggtcgtcaaaaacttccagctaagttgcggaacaccttttactaaaatatagcctaataagccggctaaaataatgacaattaatacagcaatggcatagaaaacgcctgtcgcgattttatcttttgtttttacattcatttgactttcctcctacgtccgatgaagcggattacaatgatgaagaatagtgacattgctagtagcaccattgcaagtgaccaaaggatattattatcaagcgtacccataactgtatttcccatacccattgttaaaatactagttaatgtggaagctggctcaaataatgatgttggaataacagcagagttcccgataaccatttgtacagcaagagcttcaccgaatgcacgtgccatcccaaacacaatcgctgtcaaaatccctgaacgtgaactacgaagtactactttccaaatcgtttggaaacgtgttgctccaagcgccaaagaagcttcgcggtaatgacgtggcacagatttaatcgcatctacgctaagtgaagtaaccgtcggtaaaatcatgaccgtcaaaacaactgtcgcagctgcaataccaaagccacttcccgaaatatgatctcgaataaacggaacaacaacgcttagtccaatgaatccataaacaacagatggaataccaactaaaagttccataactggttgcaaaatcttcttaccaaacttaggtgatatttccaccataaaaatggctgcaccgattgctagtggtcctgcaatacaagcggcaaaaagcgttactgcaaaggaaccaataatcattggtaaagcgccgactaatggattaccacttgcatctttttgcgaaggattccagtctgtcccagttataaaatcaacaaaagacactttattgacagtaaatgttgctaaacctttcgatataacaaaaaataaaatagacgctgcggcaataaccataatagaaatacagatgaatgtaataattttgcctctagtttctagatgcgcctttttagaagtttgtgtaagcttcttttcttttatcgcttccaagtcacgtaagctcctttctcctcccatgtttactcctaacatgggtatacgtctatcccgatactactaggatagacgcccatttcattctttttattttacgtcagttagtttaccagatgcatcgcgttccactttcatggatttgattgattggtaaccaagttgtggtacgatattgttttgcacttcatcagaagtcatgtattttaagaaagtttttgttagaccttttggttcgccattagtatacatatgttcataagaccagattttccagtcgtttgttgctactttatcttcagttggctcaacaccatctaatgaaagtccaactacggaagcatcaatgtaagagaatgctaggtaactgattgcccctggagtttcgcttacgattttacgaactgtaccagatgaatcttgttcttgtgctttaattggtgttttaccatcaagtccccatttttcgaaagtagcacgtgttccgcttccttctgcacggttgatgattgtaattttttcgtctttaccgccaacgtctttccagttagttgttttgccagtgaagatatcgattaattgttgtttagtgatgtttttaacgcctacatctttgtttactactggtgccattccgacaaccgctactcggtgatcaactagtttcgaagcatctacgccgtctttttcttcagcgaatacgtccgagttaccaatttctactgcgccttgttgtacttgtgttaaaccagttccagaaccgccgccttgcacattgatttgtgctttagggttagtgtttgtaaattctttggaagctgcttcaacgagtggttgaagtgcagtggaaccgactgctgttaatgagccagaaacttctttatccccttttgttgatccgtttgctttatctgctgaactgctgtcacttccacatgctgcgaagacaagcattactgctgctaacattgctactattcccaaatacttctttttcattatcttattcccaccttgtttttttaattgttattccttacaagtattactataacgtttgagatttaaggtggtgtgtagctaatgttaagtaattgtaaataaccacattttttgtcgaaaatgtaaacttttttatgaatatctttcaaatagaaggcaaactggtaaattatcgccccaattttgttcgtttcgtaaataaaataaaaatatcctgtctgaaagattacattctttcaaacaggatatttattaggctttttttggtaaagtaacacggaatgtcgagccaacttcttcttggctttctacttcgattcgtccgccgcaattttcgacgagatgtttgacgatggaaagtccgaggccggtgccgcctgagtgtctgctacgtgctttatccactcggtagaaacgttcaaacacgcggtcaatatctttagccggaatacctattccgttgtctgttacttctattataacttctgcctcttgttcaattaatttcacttctacttttccgtccactggggtgtagttgattgcattagaaagtaagttaattaaaatctgttgcaatttgtcccgatctgtttcaatagtaacggatgggattgttttttccggaataataacttgaatatttttttcggtcgccatttcaaaaatagtacgagcagattgttcgattacttcgtccacctctaccaattcaacgttttccgggaccggattttgttcaattctggaaagtgcaagaatatccataattaaacggtgcaatcggtcgctttcttctttaataatcgttaggaatttttttagtagcatttcgtcgtacattgcgccgtcgagcaatgtttccgcgaagcctttaagagctgtcacgggggtttttaattcgtgtgatacattagtgacaaattcagaacggacattttccaaatggcgaatttgagtgatatcatgcagtaataaaataatcccagtaatttccccattctcccctaaaattggtgaaacacttgcatctaaaatcatttcgcgtgggaaatagagaataatttctttttgttgaatggtttttgtttcaaaagtggcttctattaactggctcagtgcaaaacttttaattacttcataaaatggtttgccggtgatttctgtctctcctaaaatttgatacatggtgcggttggtcataatgacttgtttatcgacattaatcagcattacgccacttactaagttttggacaatagcattaagtcgttgttcattctgcttgatttcaaacatttgtgtttccaaactttctgccaatgtgtttacactaatggaaagatcttgaagttctccgcttattttcccatgaatacgactgtcatatttatgattggccaaatctgtagaaacttcgataatttcgcgaaccggtctagtgattttcctagctatgaatacactaattgccgcgataataacaagcgcaataccgaaaataagtgctaagttaccccagagtttagcgacagccgcgtcaacagattcaagtgaaatagaaattctcagtacaccatctgttttgctttgatgtttaacaggaactgcgacataaagcatactataaccaagtgaatcactttcacggattgaaataccaacgctttccccttttttcagaatatctgttacttcgggccgattcatatggttatcaagtttttccgggtctttttttgtatcagctaccacgtcgcctttgctatcaatcaccgtaatgcgtgcatcaatgtcctcgccgagtggatcaagacttttttggatagttgcggcatctttatctaaatctaaattctccatattagttgtttgaagcagaatttttgcgtcatcttctaattgattttctttcatatttaagtacgttgatttcattagttccccggaaaaaatcccaacaataaccatcacaacgaaaaataagataaaaaaggataacccgattttcagccataatttcttcattattttacgttctccattttataaccgaagccacgaattgttttgatatatttaggttgtttcgtatctagttcgattttatcgcgcaaatggctaacatgaacgtctacaattcgggtttcgccaacgtaatcatagttccagacagtatcgagcaattggtctctagagaaaactttgccacgatgattcgccaggaataataataactcaaattctttcggtgttaggtcaagtaaatcatcttgtaaatacacttcgtaactatctggcaaaattttcaaatcaccaattaatatagtggcttccacatcttcggttaattcttctattatttctgcttttccttctgttcgacgcaggatagctttaattctcgccactacttctcttggactaaaaggcttagtcatataatcatctgctccaagttcaagtccaataattttatctaactcttcatcttttgctgttaacattaaaattggtacatttactttatcttgacgaagtttttttgttacttcgattccgtccatctcaggaagcattaaatcaagcacaattaaatctggcttttcggacaaagcgagctcatacccagttctaccatcttcagctgtcaccacttcaaatcctgctttttcaatattaaattgtagcaaggtaacaatagaagcttcatcatcaactacaagaatttttaccaacgtacttcccatcccttctttatgtaacccttttatctaaaatatagcatgaattaacctttttcgggtagaaatgcatttatattaatcttatctttacaaaaacttaaaacaccaatgctgctttcaaacaacactggtgtcctaaattatcttggttctattaataacaaaccaagttcaaatgattcattctcataaagtgctgtttgttcaaaacgtggttcaccagcattatcgattactttcagcttacaaaatgctcggtttaagtttagcgcttcgtatagttcctcgcgagtacgcactggttgactgtttacttctgtaattttttcaccagctttcaagtttagtcgcgcagacggagtggccgcacgagcacccaaaactacaagcccatctggctgaggcccaaatttcttcggtgctaattgttcggaacgatagtggcgataagaaatccaaaatcggccaattacagcgaacatgaaagcgaacaatgtcagtactggcatcacaattcctaataaaccagctacagcaataatcgttgctaatgttgttacttcaatagcaattttacggcttgcttcttccggtagttgtgtctgtacttgttgttgaaagccgatgaataacggtaaaatgattaatgaatacgactgcgaaccaatagcaaagactggccaccactcaaaaatttttgtaaacacatctcctggtacaaacataacaatcggtacaaaccataattttcttaattgaaaggaaccgattaatttaccgcgcttacttttccgaagagatggagagggattttttgcgcttgtatactggattaagaaagcttctacaaataacaatactgcgagcagaaatgtcatggaaatcataaagttatcaataaaaatcgagtcatatgtgaatacctcattcgtaaacggcgctaaactcacatcaaaataatagcagaaataaaaaatcaaacttgtaatcccgatagtaaatgccgttgaactcaaacggaacattcctacaattagcaagaaacaagctaccacattgaaaatagcaacccactctatcatcacaccaaatccaatgagagaagtaatgacagaaatagctaatccaaataacaaactcacaccaaagaaatttttcaattctaaccaaggtgaataaatactgatactaaatgattttcgttcccacttcacacggttaaaaccagccaatatcgctaaaagaattcctacatacaatgctggttgtagaagtagtctccctattccatttagtatttcaacaaaaacatccattttctacaccagctttccctaatacttctataatataggcgataaaagtcggcttaccgcttctttaaatttaatccataaagatcgttttgcatataattcaggtgttagttgatacgattttaaaatatcttccaaaaaggcatcttctagtttttgcaccatttgtttttcataaataaaagcatttacttcaaaattaagtcggaaactacggaaatccatatttgcggttccaactgaagcaatttcaccatctacaacgagggtttttgcgtgaataaagccattatcgtaaataaagattttcgcacctgtttccattaactcaccggcataattagttgttgcgcggtaaacaaaagcatggtctggcttattaggaatcataacacggacatctaccccagaaagtgctgcgattttgattgcttcaagtaaacttgcatctggaataaaataaggtgattgtaaataaattgtttttttggcggcattgatcattttgatgtaaccatttttgatttgttgccattcggaatcagggccactcgaaacaatttgcatacttgtatgacctttcccatgaaaagtcgggaagtatcgcgctttgtaatcaattttatgtgtggacgatgcagaattccaatccataataaaacgagtttgcatcgcataaacagcttttccatgtacacgcaaatgtgtatcacgccagtaaccaaatttcttcgatgccccaagatattcatcaccaatattaaaaccaccaatataacctacgtctccatcaattatagctaattttctatgatttcggtagttgagacggaaattaatcaatggtaatttagatggaaaaaatggtctgactaaaccgccatttttttggaaggtgcggaaaaatgattttttcgttgtccttgatcccattgcatcataaataattttcacatttaaaccttctgctgcttttctttcgagcacgcgcattaagcgattgcctagttcatcggaatgaaaaatataatagatgagatgtatatgatctttcgctttttcaatatcagcaattagcgcatcgaatttctcatgtccgtccacaaaaagttccacttcattatcttgcgttaaaatagcaccatcgttcacgagcaataaataaattaaatcacgatgttttttcacattcggatcgctaaatggaaattctttttgccgtatcatttctatttgattggcagtagattcctgtatcccaattttttcttgtcccttccaatcaaaaatctttttgcctgatagttttctcccaaaaatcaaatagataatgaaaccaaatatcggaacaaaagttaagactagcaaccaagcccaagtggcggatgtatcgcgtctttctaagaagaccgtcactgccgcaaagaatacatttaaaattagcaaaatcactaataaataagccaacagtcccattgtgttcccccttttcttacacaaactgatagtagtatcatatcataaaatccgcatttagcctattccagttcgtttctatgcaagaaaaaaccattgatttatcatcaatggtttctgaattaaatatatggtgctggatcgactggaataccgtttttatgtatttcaaaatgtagatgttgtcctgtcgattgacctgttgatcccatgataccaattggttggccttgggaaacttgttgaccggtaactactttcaaactgcctgcacgcatatgtccatatagtgtctggaacccgttgccatggtcaatttttactacatagccataaccaccaaatccactacctgatgcaccaaacccagaaaatacaactgttccggatgctgcagctgaaacagtaactgtaccaccaccagcaatatcttgacctttatgggattcgtatttgccagtcacgggatttgttcgttcactaaatccagaagttaaaataccagaagctggtttaataaattggcctccaccggaacttactgtttctgtagcttcatttgatgacgaacttggttgtttgacaacagcggcactcttagcgcttgatgctgccgcagcttcttgcattcgtttttcttcggcagctttaattgcagcttcttgttttgctttttcaccagcaatattagaagcaagtcttttttcttcatcagtaagcgcaccttgttcactagctaaaagagtttgttcactcttagttaagtcttttttgtttgctaaagccataactaaatcatttttttcttgtttttgactttccatattgtttttcgaaacttctaattccactgcaagtacttttagattctctagttttttctcagaagtagattctgctacttttagcttatcttgatcatctttttggtcttgcataatgttttggtcagcttttacaattgctgatacaactgtcacgcggtcaacaagttctttaaaatcatctgcttcaaaaatcatatctaaataagaagtggctgttccagttgtttggatagcacgcgctcgattatcaagtactttttgacgatctcgaatgtcattgcgcagtttttccatttctttttgcaatttctttagtttctcgttttcagagctcactttatcttcctgctcttttaatttcttgttagtatcatcaagacttttcataagcgattctaattctttagcagcgtctttttcagcactttctaaatgatttaattctgagtttttcgagtctatattcttatctatttctgattttttttgttcaatttcattttgacgcttttgcatatcattgatggtatccgcgtgtgcaccagtcagcggcgcagaaataatcaaaaggctaagtgccgttgctactccatatttttttaacattttaagctccttttctattctctatttgactaggaacttcataattccctttaccataccatataaaaaagcacctttgtttaaaacgacaaaggtgctttttaacttttcaataataattagaagttagctacgcggccatatcctacaagatatttagcccagtagccgctagtgatgttgtcatatttaacgccattgttttgagcattgatcatttgaccgccacccacataaattcctacgtgagcaattccgctgccatagttaaagaatactaagtcacctggttttgcttggctagcgctgattttagatgctgctgcatattgtccaccagatgttcttggaagagaaacacccgctgcacggaatgcataagaagtaaatccagaacagtcaaatgcgcttggtccagttgctccaaggctataaggttttcctagttgtgcgttagctgcagaaatcattgctgagtatccgccactagatggtgttgctgcgcttggtgctgaattgttgtcatttgacgcaacattttttgttgtattagattttttgcttggtgtagaggtatccgaactacttgattcttgtccaacgtttgaagatgttgcttcacgtaatgctgtcgcacgtgctgtagcttctttagctgctttatcacgttcacttacaagaccagcttttgcattttcagcacttgcttgatcagaagctagttgagcaacgattgcttctttttcagctttttgtgcttcgattttattttgttgtgcttcatattcatgaattgctgttgcttgatcttcttgttttttcttaacagcagtttgttttgtttttaaagctttttcatcattttgttgatcttctaaaatagatttatcagaatcaactaattggttaactgcagaaacacgtccaactaagtcagaaagattttctgcatctaagataacttcaagataagcattagaattagaagttttttgcatcgcacgagcacgttcttttaaaacagtttcgcgttctttaatacgttcattgatacttttaatatcttcattaagtttttttagttctttgcctgttttatcaaattctccttgtagagatttagctttttcttgagctttctcaaggtctgctactaaaccagaaagatctgattgtaaatctgtttttttagacttgatgtcgttaatttttttatcttggttttgaatgtctgtattcacgtccgcgaaaacattagtcgtaaaagctggcgtcaaactgataactgctgcgagtgagatcgcaataaacgtattctttttcaaaaagtttacctcctaaaaagctccctagctttttcttttaaattatttttatttcgattcaagtaattttctgagttagactttcaagaatctgcggatagatattacgcttccccaaatcccgattagtacgccgattgcaataatcaagccactaatttgataagcgaatggtgttggaggaagaagtgatagcgagcttgtcactaacttcggattcaccaagttgtaaatattaacatagcctataaatgttaacaccactggtaaaatcgagccaattaatcctagccaagcaccttctaaaacgaaaggccagcgtatgaaccagttggtcgctcctactaatttcattatttctatttctcttcgacgggagaaaattgcaatcttgattgtgtttgatattaagaacatcgctgttagtaataacccaatgcttagtataataccagcatatcgtccccatttcaaggtatcaaacaatttatcgactgttttctcaccatattctacattatctacgtactgtaatttttctacttttttagcaatagtcttcgtttgtgtgggctctttagcctctacaacaaacacatcgtatagtggattatcttgtttaaacaattcgaagtttttgccgtacgcaccaactaatttcttcaattcgtcatccttagaagaaaagctgacactatcaactccatcaatcttctcaatgtttttctcaagttcttgctgctgtttcttgtctgcgcttagagaaatatgtacgttaatttgtacattgttttctacatccgttgcaagcttgttcatgttgatcaatattgcaaaaaacacgctgactaagataagtgttactgttactgcactcgctgctgcaaaggtcatccaaccattccggtaaaggctcttaaaactttctcttatatgtcttcctacagtcctaaatttcatagccatattctccttgctgctcatctcgaacaattcttccattctcgatagcgattacccggtgtttcaatgtgttaacaatttctttgttgtgggttgccatcacgatggttgttccgcgattgcttatttcttcaaggatattcatgatttcccatgaagtatcaggatctaggttgccggtcggttcatctgctattaatactttaggcatatttgcaatggagcgggcaatggatatccgctgttgctcaccaccggaaagttcatccggcaacattcttactttatgcttaaggttgactaaatctagcacttccataacacgttctttaattacggatggttctgtctcaaccacttccatcgcataagcaatgttttcataaactgttttgctttgaagtaatttgtaatcttggaataccacgcctacattacgacgtaaatatgggatttcacgatttttcatattaatcaaatcaaatttgtctacgatgattttgccttttgtcgctcgttcttctctgtaaatcattttgatgaaggtagatttaccagcaccactcggacctactacataaacaaattccccttcgccaatgttaatgttgagtccattggcagctgttatgccgttagggtatttcttataaacatcttccattaatatcattttatcaccttactatgcctttctactgagttacattttaggtaatgcatggtaaccatgaagatgagttgtttgtaggtacgaatttaaactcacaacataagcttaattataccatgacagtttttcatctataggttaattgcattacaattatatttcagggtgtgacaatatctcgattattgtaataggaaacacgattattacgttgatttccaatttatatttgtctgtggtttagagttattaagacaaaataaaaaagaacccacattggtcttttctactgctaacattgtaacttgtttttaccctaaataacattacaggtacattaaaaatcattacagttctagctagcggaatagaccaatccagttaaaatagctcgaggtctgcaactaggctaaactcgtttgtcatcaaattgtcaaaaacctggcctaaaaacttaaaaaagtaccatttcctgactaaaaaagttaggaaatggtacttttttatgatgtaaaaccttcacccattacttcacttgcactcattacaaccacaaaagcctctgggtctatctcttttataacttcttttaaccttgaaaattcgctttgcgcaatgacacataataaaatttgcttgtcatcctctgtatatccaccttttgcggagagccgagtaatgcctcggtcaattttaaacagaattgcttggcggattgcttcttgattttcagaaataataaagactgttttggattgatttaaaccaacttgtaccaaatcaattgttttacttgtagcgaataatccgacaagtgcgtacagtcctgattcaatatcaaaaacaaacatcgccgaaataacaacgaatccatcaatcaaagccacacaaatccccaatgttagatgggaatatttatgcaaaatttgtgctgcgacatccgtgccaccagtagatgctttgcctcgaaaaacgattccaagtcccattcccacaagtacgccgccaaacaaagcagccacaagaggttcatgcgtccatggttccaatccttgcgttaaatacacaaagaatggcaaaagcattgttccaacaaaagttttcaacccgaattgatagcctaaaaagaataatcccgctagaaataaaggaatattaaatgcccactgaataaaagctggattccaacctgttaaatagttaataatcgtacttatcccactcactccgccagaagcaacgtgattcgggagtagtaaaacattaaaagcaagtgcgatgagagctgcacctataatgacataaatatactcaattaatttagaagcaactggggatagcggttgtttctttcttttatttgtcatctcttttatccaatcctagaacgcaaatatgcattgataaagtcatctaagtctccatccattactgcttgaatattaccggtttcgtaatttgtgcgatgatctttcaccatggagtaagggtggaaaacataggaacgaatttggcttccccaaccaatttctttttgttctccacgaatttctgctagctcgcgttctttttcttcttgttctttttgatacagctttgtttttaacattttcattgcttgttcacggtttttaagctgcgaccgttctgattgacacgttacaacgatgccggatggaatatgtgtcatcctaacagctgagtcagttgtattgatatgttgtccacctgcaccagttgcgcggtacgtatcaattttcaagtcttctgtacgtacttcaatttcaatatcgccatctaattcaggcattacatccacggaaacgaatgatgtatgacgcctgccagatgagtcaaatggtgaaatacgcactagacgatgtactcctttttccgcttttaaatagccgtaagcattgtggccttttataagtagcgtaacactttttattccagcttcgtcccctgcttggtaatcgagcatctctactttaaagccttttttctcagaccaacgttgatacatacgaagtaacatcgaaccccagtcttgtgattctgtaccaccagcacctggatgaagttctaaaatagcattatttttgtcatatgggtcacttagcatcagttttaattcaaatgcactaatagtcgccatgtaagctttaatatctttttctaattcttcttgtaaatcttcatccgcttcttcttttaacagttccagactaatttccatgctttcttgttcttcttctagcgcatggaacgcttggtatgtttctttatatccattggattcattgattactttttgcgctgcttgttggtcgttccaaaaattcggatccaacatttggtcttctaactcagcaattcgaacttccatgctgtctaagtcaaagagaccccctaaagtctttgatttgctgtgctgttttctctagttcattacgaatttctgctaattccattctaattccaccttttttgaatttacttataaactttcatagcaaaaagcgccgtctttcaggcgctttttaaattgtttcaatctatgcttctttaccatgacaatttttatattttttgccgctgccacaaggacatggatcattacgtccaatgtgttgatctttgcggattggttggcgtttcgcttctggtttaccttcagcaggattaattgcttctcccttggcaacttgctcgcgttcaaggttttggcgaatttcagctttcatgatataacgcgccacgtcttcatcgatggaagataccatcgcttcaaacatttcgaagccttctgattgatactcacgaagcggatcaatttgaccgtacgcacgtaaatgaataccgtcacgtaaatgatccattgcatcaatatgatcaacccatttagtatcaacaacacgaagcaatactactttttcaaattcgttaaattcttctggaggtagtagtgtttctttttcgtcgtaagccgctttgattttatctaaaattagattttgaatatcttcgcttgttctattttgtagatcttctagtgtgattgtaccttcaggaagtaagttcgcatccacatagtcgataattccttgtaaattccaagcttcttcaggttcatgacttgatgcattactagaaacgataaagttgactgtacgttgaatcatttgttcaataatttcgcgtaaactgttttctgcgttaattacttcatagcgttgtttatagataacttcacgttgttggcgaagtacatcatcatattgtaaaacttgtttccgggaatcaaagttatttccttccacacgtctttgtgcggattcaactgcacgactaaccattttactttggatagcatcttctgccataccaaagcgttccatcattgatttcatattgtccgaaccgaaacgacgcatcaattcatcttccatagaaagataaaattgagtcacaccagggtccccttgacgtccagaacgaccacgtaactggttatctatacgacgtgattcatgacgttctgtaccaataactgctaaacctccagcttcaatcgtaccttcaccaagtttgatatccgtaccacgaccagccatgttggttgcgattactaccgcaccacgttcacctgcatgtttaatgatatcagcttcgcgttcatgttgcttcgcgtttagtacatcatgcttaattcctttgcgttttaatttgctagaaataagttcggatgtttcaatcgcaacagtcccgactaatacgggttgtccttttgcatgacgctcggcgatatcttcaactactgcattaaatttcgcttcaatcgttgtgtaaattaaatcaggacggtcatcacgaataattactttattagttggaatttcaataacgcgcatattataaatatcgcggaactcttcttcttccgtttttgcagtacccgtcatccctgcaagttttttatacatacggaaatagttttggaatgtaattgtcgccattgttttggattcgttttgaatagttacgccttcttttgcttcaagcgcttggtgtaagccttcactgaaacgacgacctttcataatacgaccagtaaattggtcaacgattaatacttcatcatcttgaacaacataatcgacatctagactcattgtatagttagcttttaacgcttgagcaatatgatgtaaaattacggtattttccaaatcaaaaaggttctctacatcaaagtagttttctccttttgtcataccgtcttcggttaattgaacagattttgttttaatatcaactgtataatcttcctcttctgtaagagtacggacaaaagtatttgcacgcacatatagaatagtcgatttttccgcttctccagaaataattaatggtgttctcgcttcatcgaccaaaatggaatcgacttcatcgataacagcaaaagctagcggacgttgtaccatttcttctttgtaaacgaccatgttatcacgcaaatagtcaaatcctaattcattatttgtgctatacgtaatatcacatgcataagcttctcgtttttctgtactcgataaagcatttaggttaagccctacagaaagtccaaggaaattgtataaaactcccatttcttcggcatcacgatgagctaagtattcattgacagtaaccacatgcaccccttcaccagaaagtgcatttaaataaactggtagtgtcgctgttaacgttttaccttcaccagttttcatctctgcaatgttaccttcgtggagaacaattccacccattaattgaactttaaatggatacaatcctagcgcacgtttcgcaccttctctggcaacagcaaatgcttctaccaataagtcatccagcgtctcacctttttgaacacgctctttaaactctactgttttttcacgtagagcatcatccgaaagagccgcagtttcatccgctaaagcaataatctcatctgcttttctctccaaatatttaacatctttttttcctgattcaaaaatttttttcaatagtccagccatttaaattctcctctactgttttcgctgtcatcgcgcggtttcatctataataactttcaggaattatcttcacttaaatatacaaactaattctatcacttattaactaaaatatacaactggttatctctttttagtcaataaaattatcaaaatgccataaattcttcatctaaaagtaaaaaaatggagacctagattggcccccatctgtaaattattattttaaattagtttgtttcaatcaaaccatacttaccgtctttacgagaataaacgatattagtaccatttgtttctgcatcagtgtatacatagaaactatgacctaacaagttcatttgtaaaacagcttcttcactatccatcggtttcaatgaaaattgttttgttcttacaatttcaagatcaaaatctccttcattttcttctggtggtgtgctgccgttaacatcagaataagcaaaataatctctttctgcacctttgtcgcggaacttgcggtttacttttgttttatgtttgcgaatttgtctttctaatttatctacaattaaatcgatgctagcatataaatctccacttgtttcttctgcacgtagcacaagatttgggagcggaatggtcacttcaactttcgcatttttatcggaatatacttttaaattaacatgaacgttagcgtctggagtctccgtaaaatatcgttctaatttatcgattttcttttcaacataatctcgaatcggttctgttacttcaatattttctccacgaatgttgtacttaagcatagcaattcctcctttgaaataaaacaaaataacgataaagaagagtattcttcttacccttagtctacgtgaaaacgatgtgttttgcaaacatttgcacaaagagctaagaagcttacattcacttatctttatttagtattttattccactaataccgcttccgcaaacctcttttagaagataaatatcaactatctgaatattgttagtgcgctcaccttgtgcactccagcttcttttaagatttgtgctgctaggttaagtgtgcttcctgtggtgtatatatcatcaaataatattacttctgttgacttcaaaatttcttttcctgaaaagtaaaatgcttgttcagatgctaatcgttccctctttgtctttttagattgcttctctgtatgctttttggctaaaagctcttcgtataggatgccagattgttttaatatcgcggttgtttgattaaacccgcgttctaatttccgcgtctcgcttactggaattggcacaatcttctctttcttttctgatagaaaggtacttaattcctttttgaaaatagcccctatttcataatccccttgaaatttaaacttcttcatatattctttggcgaaatcattgtaacgatagatggatttattactatctaaaaaatgtgttctactttggcagtcctcgcagacatcatctaaggattctttactacaatttttacatagtaagccagttagtttttcaaaccccgctaagcataaattacaacaaattggcagaggttcaaataaccaacttatttcccaactggcactttgcctaaccggctgaaaacaaagtaagcaattagtcatctaacatcccttctatcactccttgttgattcattttttgaatgtgagagatagcttgcttcatttctattgttttaccgtaatgaaaaaagcaaacgtctccagtcggatgggatattttcctgcctgctcttcctgaaatctgaactaaagcagcttccgtaaaaatacgaccctcacttccaaacaccgctacttgcacatctgtaaaagtaacgcctctctctaaaattgtagttgttaataacagtttgattttcccttttcgtagccattccactttctctttgcgcaattcatcggctgaatggactgtcactgggcggatataacccttattttcaagtgcctttgcaaatttattcatagcatcaatttctggaaagaaaattaaagccggctgatctttcttctccacaccattcatccactgaataagcttgggagatattttccctttagctaaattctttttccatggaccaatccagcacgttcttggcacaggcaatttctttcggtgatatcgtccaggaattttcacaaaattacgttttccttttacacactcttcttgccactttttctctggtgttgctgtgattattattgtggaaccttcttttgtcctggctttcataacggcatattctaaaaaagggtcttttgcataaggaaatgcatctacttcatcaataaaaataacttgaaacgtttcataaaagcgaataagctgatgggtcgtcgctatcacgaactgctctccttggtagttatcttttgagtctccatatagacaaacaatatccatgctagggaaagcttcttttaaacgaggaagaagttctaaacaaacatccactctcggagaagcaacacaaattctaaaaccttgtcgcaaagcccagtccattccttcaaacatcatctccgtttttccagatccggcaaccgcccaaagcaacatatccatttttccttttaaattaatgactaccgcgtttgatgctttccgctgtcccgctgacaaaactccttcccatctcaataatatttcctttgtctttggtaataacatagcttgttgatagtataatttttggcaactatttactcgtcccataacaatgcaatttctacaataaatacagtcctctctcttacataatgcacagcacattttgccaaataactgcgcatccgtatttccacatcgaaagcatttgtttgattctattgctactacttctcttaatccctcgttactctctatttcacgttcttgatacagtcttcccgggaagatgtccatctgtattcacctccccttagttatacactttttctttttttattgcagaaacgaaatacttgttttcgaccgcatacttataaacaaaacaagtatttcttttagacgaaaacgagtatttttgctatccaaaactactgaaaaaacaaatttagtctccatgaaaaaatctccagctaaagccggagatttctttattttattgaccaagttaatccaagcgcaccttcacccaagtgagttccaatgactggaccaaaataacttaattcaaatgttacttctgggaatttcgcttctaattgtgcaagccatgcttcaccttttgctagatcattaccatgaatgacataagctttttctgccgttttattttgaacggctttttgaagaatatcttcaattcgtttcaatgcctttttttgtgttctaaccttttcaaacaggacaatttgtttatcattaaaatgaagaattggtttaatttgaagcaagctaccaacaagggcttgtgctccattcaaacggccgccacgctgtaaattatttaaatcatccaccataaaataagcatcttgtgcctgttttattttatctagtttttggataatctggtccaatggctcgtttgccaaagccatttcagctgctttaactgcaaacattccttgcgccatacaagaaagctcagaatcataagcgactacatttagcccttcaatcagttctccagctgaagccgcattctgaaacgttccactaataccacttgatagatgaatactaattacagtatcaaaaccttgttctttcaggttttcaaacaagtgaatgaattctcctggggcaggttgagaggaagttgggaaattctcagcttcttttacttttcgataaaaatcggttgcagacagttcctcaccttcacgataagatttcccatcaattattacagaaagtggcacgacattgattcgtagctgctctttcacttcgtctggcaaataagttgtgctgtcagtaaccactgctattttttcgttcatatagtccccctgagatttctttagcgaatgtatacccagccgtgcttgattgccgttaccaccgcttgagttctatcattcactttcattttttgtaaaatactacttacatggttttttactgttttttcactaatgaaaagtgtctccccaattccgcggttactttttccatcggtaagaagttgcaatacctcgcactctctatgcgttaagatgtgtagtggcattttgacttctggttgttggtagccataaacaccttgagaagtgttagtgcttgctaaatggcggtattcacgaattaatttaattgctacacgtggatgaatatacgcgcctccattatcaacaatttttacagcttctacaagttcatgagcatccatttcttttaataaatagccgactgctccagctctaagtgcttctgttacatattcatctgtatcatgaatagtcaagacgattactttgatgctaggaaattgacgtactagcatttcagttgcatctagtccgttcacagttggcatattaatatccattaaaacaatatctggtttatattcgcgaacttttgctacgatatttttaccattttcagcttccgctacgacctcaaaagaatcttccaactctaaaattcgcttgataccttcgcgaaacaactgatgatcatctacaatcatgattttgagtgccataatgactactcctccttcacttatctaatttcaccaagcctctttgcaatcgaaaacatcatcctttttaagtagcaaaaccgcttaaccttataatccctgccataaaattggcaattaaacatttctcttttaagtactatttactcaaacttacctatttccaacacaaactataccttgattatactgcatagcccaagaaaattactcctatatgcctataaaatgtaattgaaaactagtctaaagtaatagtagtttttattataacacgaatttgccgtcacttcatccactgcacttagaaaaatatctatacaatcgctttgctttcggataaaataaaagcagactaaatgcatcaacttatggaggttccttatgttggatcattatttaaccatccatagcgatggaaaacacgaaataattattgaaaagtcccgctttatctgccatattaagcgagctacaacagaaactgaagcacaaacctttattcaagaaatcaaaaaagagcatcgtgatgctacccataattgttctgcttatattataggagaaaatgaccaatatcaaaaagcgcatgatgacggagaacctagtggaacagctggctttccaatgctagagatcttaaaaaagaaatctttaaaaaatgtcgccgttgtagttactcgttattttggaggaacaaaactaggtgcaggcggcctagttcgcgcatatggtagtgctgttagtgaggctattcaagcaattggtattgtcgaatgcaaactagccactattgttgaatgctcatttgcttacccacttttaggcaaggtcgaaaatgcgcttgaactaaaagcatatcaaattgacaaaaaagagttcactgaaaaagtagtacttcatatttttgttgataacgacgaactgcaagattttttcaactggatcaccgagatttcaaatgggcaactggaatataaagaaggaccacaaaaatatagagaaaaggatgtcacttagtatgtccacaaacgtatttatccaattaccagatactattcttactaaacgaactacattaaaaaaaacctctattgcagatgctactacattatttgatatttggtctgatgatgaggtagctcagtttatgaacattgaaaaattctctactattcttcaagcagaagaaatgattcaagcaattgaaaatgaaccaaatgcttgcagatacaccattttcacaactgatgattctttaaatgcgattggctcgcttgggattaatgatattaacaaaacgaaccagacaatcgaaattggctatgaactagcaaaaagtcattggcgccaaggttttatgtttgaaattttgacaacatttttaaccactgtaaagccctatcttccctataaagtgcttacagcaaaagttctaccagataatgtggcttcaatcaaactactgaaaaagcttggttttgagcttacgacaactgggcaagaactagatttacattctggtagaatttgtgaaatcagtaattatcgaatgctactgaaataggacaaatattacatttttgaaagatatcatcttttttgtattttttttcgagtaatttctgtataataacatcaaagtttaaaaattaaagaaaccgtaaatcgggcgtaacattctttagtgcagcaaatgatacaataaaacttagaaaagtgactataaggagaattaatatatgagtaaaggcactgatgatagccgaagaagcagcaagaaatacaaacgcagaagaaaaattttattctggattctaattcctgtaatgtgcttagtacttgcaggcgtcggatacggcacttatctttttagtaaaacaaaactcgcagcagataactcttatgataatgtaaggaacggaaaagcctctacacttcgaacgaatgacattgaacctataaaagatagtttttctattttaattattggtgttgataccagctctacacgggccgaaaatggtaaccctcgaagcgattcactaatcctagcaacatttaatgtcaaagattcacgcgtagagatgactagtatccctcgtgattcctatgttcatattgaagattccgccaaagacattgataaatacacgaaaattaatgcagctcatgcatatggtggtccagaactcacaatgaaaaccgtagaagaagaatttaagattccaattgattattatgttcgttttgactttgatgcattcttaaaaattgtggatgctttagacggaattgatgtagatgttccagtggacttcactgagcaagactctaaagacaacgccggtgcaatcactctaaaaaaagggcctcaacaccttaacgcggagcaagctttagcactagctcgtacaagacacatcgatagcgatatcgaacgtggtaaacgacaacaattaatcattaaatctattgtaagcgaagcgacctccatttcttctgtaagcaagtattctgatatcattgaagttgttggagataacatgaaaaccaacttaactttcaatcaaatgctttctatcgcaaaatatggaatgacaaataaaattgatattaaatcccttaacttaaaaggggatagcaatccaatggacggtatttattactacaaacttgatgaaagctccgtgcaaagtatttcgaatgaatttgctgatgaacttggaattaaacaaccattccctggtgcagcaccgtattcagacgaaagttctagcacaactagcagttctaattaaaaaaagaccaacaactaataattagttgttggtcttttttattttcgttttcgatgtattttttgaagtaaatttaagatcggccggtaatcctcaccaattaacccaataaattcaacaataatttcaatactaaaaattaataataacagtaataacattgctccccaagtagtggagaacgaaaatacaaatccagtcatagaaaatagtaatgccatacagtagattagtaacaccgtctgcttctctgtaaatcctagcgccatcaacctatggtgaatatgagatctatctgctgaagatatcggcatccgctcttttagccttcttacaatagcaaaaaaagtatctgacaaaggtacacctaaaataataagtggtactaacaatgagatgaaagtaacgtttttaaaacccataagtgataaaacagcaatcatataaccgaggaataacgctcccgtgtctcccataaaaatactagcaggcgggaaattataaatcaagaaagccgcaactgctgctacaagaattaatgcaaccggagcaacaaaaacatctttcaaaagcaaagccatacctgcaatagtcattaaagcaataatagaaataccacccgcgagaccgtctaatccatcaattaagtttaacgcattcacaattgcaactatccaaataatcgataatggaatcgcaaaatacccaaaatctacttgtccgtaaaatgggacgttaataaaattaatagtaatgtctccccagacagttacgcaaagagcagctaaaatctgtcctaacattttccattttggtgataaatcaaatatatcatctataaagcctgtcgcaataataattaatgctccgaaataaattggcaagaaacctgatttatctattggggctaaaatcatccctaccgaaaaacttataaaaatagctaatccacctaaagtggctgtagtttttgtatgtttgtgtctttcacgcggtgtatcaaccgcattaattcggaaagcaaacttcctgattatcggcaccataatgatacctactgcaaagctaatcaatatactccatattagcaatattttttcagctccatcctttatttagcaaaattctttctgttgatttagtatatttttgtaacacatctaaatctaaagccactccaatcccttgaccggttggcacagtgagttttccttgatttaatacaaatgctggtgaaacaatatctttattaaaataacgatttgatgcagaaatatctcctgggaaagtaaattccgctctagcagcaagtgcaatattatgagccctaccgataccagcttcaagcatgccgccacaccagacaagcaaattattatcgctacaatacttcgctatcttaagagcctcagacataccaccaacgcgcgctaattttaaattaactgcctgacagcttcctaacatatgggcctgtttcaaatcatctaatgacctaatattctcgtccaaacaaatacgcgtttttaattttttttgcaaccaagcatgatccacaaaatctttagctccaaatggttgctcaatcatttctaaattaaagtgatctaattcttttaataaccagaaatcttctctattatacgctgaattcgcatcagccatcaagcttagattaggaaatttttctcgaacagctttgacaaattgaatatctttcttaggtgctatttttaacttcactctttcgtagccctcatccatatattgactaactaaccggactaacgtttccgcatcaggctgcaatccaatgctcacgccaacagcaatcgagtccttctctgcgccaatcattttagccaatgagagcttctcgttttttgcaaaagcatcccaaacagcaagctccacagccgctttcgccatttcatttccttgaatccagctaaacatctgattaatctcttgaggagttcgtatttctttctgcgcaaggattggtaataaatgctgtttaacaatagaaatagcagtgctcaaagtctcttctgtatagtcaggtaacggaaaagcttccaactctccataaccacgtataccttcctcattcactaactcaataatataaaaatctttactatttagctcaccataacttgttttaaacggtgcaataagaggaagttctacatgaattagtcttgcttcttgaaaatacatctactcaccctttttcaaacgcttgcgctcttttcgaatggcaagcataaattgaggtattgcaaaaaaacgtttccatcttgagggattagaaagaagcctgtatacccattctaaccttaattttatccatatttttggtgcgcgctttacactatctgttaaaacatcaaagcttccacccacaccaataaaaatgcctttagtaaaattagcaatctgagacaaaatccatttttcttgagcaggggaacctaaagcaacaaaaatcacatctggttgtgagacgagtatttccttagcaattccttcactttctaatacatcaaagtaaccatgatgaacaccacaaacaactgcctgtgggaatttttcccgcactttggcctctacaacctcactaatttccggttttgctcctaaaaaataacaatttagtggcttatttaatagaccaaccatcgtgtcataaccagtaactcgttcttttaaaggctctccaagtttttctgaggccattattatcccaataccatcgggtacaatataatcagcttgccctaatattgcttcgaactccttatccgtgcgagcatgcataacaatttctggattagccgtcacaacaaatcgacgttccccgttcttcgcggccatgtaaagctcctccacaaatcctgcttgcgtcgtattatagaaaggtatatttaaaattgaaatttcctgctttttcatatgtatctcctaaaaaactttattatgtataagtttatcataaaacaaggatgcttcctatttttaatctataaaaaagactgcaaatagcattacgccatttacagtctttcatatggaacgaattaatctaaaatttgtactttaacttgttttacaccccagttgttagcttcttgtactgagtttaaatgtacatcgattttattacctttaattgcgccaccagtatcagctgcaattgcttgtccgtatccttcaacataaacttttgaacctaaaggaataacagatggatcaactgcaattactcgtgaattatcatttaaatcaatccctgtcgctgtcatgtggcccatgccaggttcagctttactatatgctgttgcagttaccgttaactcttttgaaacattaccttgtgctgaagaactattcgaagatgcttcattagaagaagttgatttttgagttgttggagctgctttttcttctttcggttgttctgttactttattattggctgaattatttgctgttgaattgttttttgaagtattactttcacttgctgaagctttattaccaatagataatttttgaccaactattattaaatctgaagaaagattattccacgatttaagttgattaactgttacaccattatcaacggcgatatgtccaagggtatctcctgcaacaactgtgtattcagaattgttattagtagtggattttttctcactactatttacttgcaatgtttggttcggaaaaataatgtcagaactcaaattgttatcttctttcaattgttttatagagacattattttcatttgatattttccatagtgaatcaccatcttgcactttatactcagctgcaaaagcttgagttgaaccagatcctgcaataattaaacctgccgcaatggctactactgtctttttcatgtaattattttccctccttgataactttcgagaataatcgtaccatacgaaactatcagcttggttactaaaaaattaagcatgtatgacacactttcaaatagtatccgttttcctgcaatatttgtaaattgcctttattgtctgatttctataactactgttcgtattttttgtgaaaatcaatctagcataactcgccgtaaaggtttagccaattaataaaagctttcttgattgttcacttaatgaattaaatgtgcaaagtaactgaaattggaaaatttttccattacaaacagaactgataatttattgattttgttgttttttaaggcgagatttttaaaattcattatgaaatatggctctttataacaaagtattacatcattcatcctcttcctgaggtatattaactactctttcatctttatttcgacttgataaataccgaatctgatgaactaaaacttccgtaatataaattttctgttcttctttatttaaataattacgagattgtagttcaccaactactcctactaattgtcctttagtacagaactctgcagtggcttctgctcttttaccccaaataacacattgaataaagtcagcatcattatcaactcttttatttttaccaaaccgatttaaagccagggttaaattcaaaacagccctgtcttccgtggtccatttcaattctggttccttagttaatctgcctactaaagttacttgattaatcatataatcgcctctttcttttggtgtaaagcgattgtattagataaaaagtttattgtaaaatagctaaaacagtattttcactaggccgaaaccttccaaaaggttattttctcataagagaaaaatatcattttatgtatgtaattacatccaaagcatcattttagtactttgaaaaatttttaaaccaatgttattctgagaacatgaaaaaagcactaaaacccatttgggcttcagtgccaatctttttatttaggtagatctgataaagcaaacataatttcagcttcacaaaccaaatcgccttctactgttgctttgactttcgcttttgcaatcgcgcccctcatccgagttatttcagcctcaagcaaaagttggtcccctggaacaacttgacgtttaaatcggcagccatcaattccagcaaataaaccaattttacctttattcgcttcactctgcatcattgcaattccacttgtttgcgccagagcttccactattaatactcctggcattacaggatactcaggaaagtgcccgttaaaaaattcttcattggctgttacattcttaatagcggtaacttttttgccttcttcaacagaaataactctatctactaacaaaaatggataacgatgaggcaaaatctctttgattttcttaatatctaacatgtacatcccccaaattcaaatttagaatctattacgctttttatttgtaagtgagtcaagtaaaatgccggtaccaagtgctacaacatctaaaggattctctgtaattaaaactggaaccttcagctgttcagacattaattcatctaaaccatgtaataaagatccaccgccagtcatgatgattcctctatcaataatatccgctgaaagctctggaggtgtttgttccaacacctgtttagcagctagtaccattaggtgtaatgaatcgtgaatcgcttcctctacttcggaacttgtaatagaaattgttttcggtaagccactcactaaatctctaccacgaatttccattttctcttctttggctccttgacatgcagtaccgattgttactttaatattttcagccgttctttcaccaataagtaagttatatttacgtttaacataatttaaaatatctgcatcccatttgttaccagcgacttttactgattgactagttacaatatcacccatagacaatacagcaacatctgcagtacctccaccaatatcaataatcatattaccggaaggctcaaaaatctccatacccgcaccaatagcagcaactttaggttcttcttctaagaatacttgtttcccaccacttttttcagcaacttcacgaattgctttttgttcgacagaagttatatttgttggacaacaaattaaaatacgtggccgtgaaaaaaaagtttttaaatttaacttttgtatgaagaaacgtaacatttcttgaacaatatcaaagtcagcaataaccccatctttcataggtttaattgccgtaatgtctcctggagttctaccgaccatatctcttgcttcagtcccaacggctaaaacttgtcccgtcttattgttaatagcgacaactgcaggttcattaacgacgattcctcttcctttaacatgaattaatacattggctgtacctaaatcgataccaacatcttttgccatttacattttaactcctttcgtggtgtacacctaattttacatctcattctgaattatagcataatttatgtgcggctgaaatgtatattttatagcaatgcggaatttttcatgacaaataaaaaaaccgcatcaaaaagatacggttttcaacatttgaatttagaataaagacgctaagtttgttacatcgactttggaatcatctacacgttccacatcagcaccaagcgcttgtagttttccgtggaaattattatagcctcgatcaaggtatttcaactcagttacttgtgtatagccatctgcaaccaaaccagcaagaataagcgctgctgctgcacgtaaatctgtcgctgcaacttctgctccttgtaacttagctggaccagaaataataacagaatgtccttcaattttcatatcagcattcattctgcgcatttcttctacatgcataaaacgattctcaaaaacagtttcagtcatgatgcttgtgccttcactcagcatttgaataaccatcatttgcgattgcatatctgttgggaaacctggatgcggcatcgttttaacatctacagcttttaatttatcagggccaattacacgaatcccgttctcttcttcaatgatttgaacgcccatttcttcaagtttagcaattaacgaactaatatgttcaggaactgcatcttcaattaaaacatttccaccagtaatcgccgcagcaatcataaatgttcctgcttcaatacggtctggaataatagaatgttcagtcgcagttaattccttaactccttcaattctaattacttctgttcctgcaccgataactctagcacccatttggttaaggaagtttgccaagtcaacaatttcaggttcacgagcaacgttttcaatgactgttgtaccttctgcaagagtcgcagccatcataatattttgtgtcgctccaacactcgggaaatctaagtatactttagcacctactaatttttcagcagttgcttcaatataaccattttcaattttcacgactgcgcccattgcttcaaagccttttaaatgtaaatcaacaggtctagaaccaattgcacatccaccaggtaaagctacacgcgctgaaccagtacgtgccaaaagtggtcccattacaacaatggaagcacgcattttacgaacgtactcaaaaggtgcatcagaagtaatttctcctgtcgcatcaactgttacttcatcatttacaaaagaaacatctgcatttagatatttaagaacctcattgattgtgaatacatcagacaagtttgggacattttttaatacgctagtacctttactcgcaagtaatgtagcagctattaccggtaatacagcatttttggcaccttccattttcacagaaccatttaactgttttccaccgcgtacaataattttttccaaaaagaacccctccgcgttactaataactaaatcatttatcgaattttattaatcaaaatttgaatttaaaacatatctaagtaattttaccacttatcaccctaaaatatcaactgattttaacgtaatattaaagttgttataagcttctattaatttttgactactatagtacctttttctaactaaaaaaattaattaactgtttggaagctgtcaaataatctaagaaaaaattgcttaatgtataacctaacacaatcgaaataatcacaaataataatctagcttgtgttacatgatttttcttgatgaatttttcataattaatagcttgaagtgcccaaaaagtaattacaataaatagtaaatgtgaaatgatgatgacatatggtgattccataataatattatacatgcgttctctcctcatatttcgctactacccattttaacaaatacctctagaaaaaaacagttaatacacttatgcgtatataaaaaaacttcccggcactgtggccaggaagtaatatgattattaattgtgttcttttgcatgaattctgttgatggctctttgtagtgccagttgagccattacttcgtccactttttgttcttttgctcggctaagttcttcttctgcacgttgttttgctttttcagcgcgatcaatatcaatatcttgttcacgttcagcagtatccgcgagaatattaacttcttcaccgtttacttccataaagccaccattgacagcgacccattcctcaccagactcaacttttaaacgaacgatgtcgattttaagtggagcaactagtggaacatggccaggtaaaataccgagttcacctgcttttgttctagcaataaccatttgagcaacgccttcataaacagggccgtctggagtaacaatactaacatttaatgaacccatacgtatttcctcctgtttttatcagacttcaacgcccatgtcttttgctttttcaagaacatcctcaatgcgtccaactgaacggaaagcatcttctggaatgtggtcgtattttccggctaataggtctttgaatcctttaactgtttctttaacaggaacataagaacctttttggcctgtaaattgttctgcaacgtggaaattttgggataagaagaattgtacacgacgcgcacgggaaacggattgtttatcttcgtcagatagctcatccatacctaagattgcgatgatatcctgtaattctttatatctttgtaataaacgttgtacttccgttgctactgcatagtgttcttccccaacaatatcaggagaaagcgcacgagatgtagaagcaagtggatctaccgctggataaataccttgttccgttaatttacgttccaagttagttgttgcatctagatgggcgaaagttgtagccggagccgggtcagtatagtcatcggctggtacataaatcgcttggatagaagtaacggatccaacgttagtagatgtaatacgttcttgtagttgacccatttcagtagctagggttggttggtaacctaccgcagatggcatacgacctagtaaagccgaaacctctgaaccagcttgtgtgaaacggaaaatgttatcaatgaataaaagtacgtcttgatgttcttcatcacggaaatattcagcaattgttagaccagttaaggcaacacgcatacgcgcacctggtggctcgttcatttgaccgaataccatcgctgttttttcaataacgcctgaatctttcatttcgaagtaaaggtcgttaccttcacgagtacgttctccaacgccagcgaacacagaaataccaccatgttcttgtgcgatattatggataagctcttgaattagaacggttttaccaacaccggcaccaccgaacaatccgattttaccaccttttaagtaaggagctagcaagtcaactactttaattcctgtttcaagaatttctgttgtcgttgctaattgatcgaaagttggagcttcgcggtgaattttattacgtttaatatcgcttggaagtggttcgtccaaatcgatggtgtttcctaatacattaaatacacgaccaagagttactgtacctacaggaactgtaattgggctcccagtatcaataacttccatacctctttgaacaccatctgttgatgccattgcgattgtacgtacaacatcatcacctaattggatggctacttctaaagtaagttggctagttggtgcttcttctgcatcagatttatattcaataactagggcattgtagatttcaggtaagtttccaccttcaaatttaacgtctacaactggacccataacttggattacttgtcctttagacatgcaattattcctcctcacttaccttcccatttattgggacgttacaagaaacgccggcttctattctagcgcggctgctcctccgacgatttcggtaatttcttgcgtgatcgcagcttggcgagcacggttatattgtagtgataagtcactgattaaatcggatgcattatctgtcgcgcttctcatggcagtcatacgagcagcatgttcagcggctttggcatccagaagtgctccgaaaattaggctttccacatattgcggtaataatacttccaggatttcttgttcggaaggttcaaattcgtaagtagttaaatctacatccgtttctttacctttttcgtgaaattccgtcagtggtaatagttgctcttttctcagttcactagaaatagaattaatatggtgattataataaatgaaaacctcgtcataaacaccatcttcaaacatttgaactgtgttactagcaatatctttaatttccgcaaatatcgggtgatctgtaataccttgtacttctaaaaccacgttcatttggcgcgctttgaagaagtcacgagcagatctacctacagtgattattgcatattcatcacttgacgtatgctttttattaatttcttgaaatacttctttgattacagaactattgtaagaacctgcaagtccagtatcagaagtaagtacgatataacctgtacgatgaacaggtctagatacaagcattggatggtcgctactgttaccagtgctagcaacatgtgttactacgtctttaattttagaaacataaggctcatatgaacgcgcattagattctgcacgacctagttttgctgctgataccatttgcattgcttttgtaatttgacttgttttacgcgtagaagttattcgttgtttaatatctattaaagatgccaaagattttcaccacctttgaatttattccgagtctaaattatttttcttcagaaggaacaaatgtatttttaaattcttttaatgctgcttcaagtttcgcttcatcaggaagttttttcgttgtacgaatttcttccaaaagctctgggtgattatgatcaaaccatgtattcatttcggactcaaaacgcagtacatcatgaactggtacatcatccagatatttatgaacaagtgcataaagaatcaatacttgtttttcaactttcaaaggtttgtgcaaatcttgttttagaacttctactgtacgtttaccacgttctagtttcgcacgagtagctgcatctaggtcagaaccgaattgtgagaaggattctagctcacggtatgcggcaaggtctaggcgaagtgttccggcaactgttttcattgctttaatttgcgctgatccacctacacgggatacagaaagaccggcgttaatcgctggacgcactcccgagaagaataaatcagattgcaagaagatttgtccgtctgtaatagagataacgtttgtaggaatataagcagagatatctccggcttgtgtttctacgaatggaagagccgtaatggatccgccacctaggctatcatttaattttgcagcacgttcaagtaaacgggagtgcaagtagaaaacatcccctgggtatgcttcacgacctggaggacgacgaagtaatagggacagctcacgataagcagctgcttgtttggataaatcatcatatacgactaaaacgtgtttgccgttatacatgaattcttcagccattgcaacaccagcataaggagccaagtaaagaagtggcgccggttgtgatgcagcagcagttactacgattgtgtaatctaacgcaccgtgatgacgtaaagtttctacggcattacgtactgtagattctttttgaccgatagcgacataaatacaaatcatgtcttggtcagcttggtttaaaatagtatcaatcgctacagatgttttaccagtttggcggtcaccaatgattaactcacgttgaccacgaccaataggaacaagtgcatcaatcgctttaatacctgtttgtaatggttcgtttaccgattgacgttgcataacaccaggtgctactgcttcaatcggacgagttccagttgtttcaattgggcctaaaccatcaactggttgacctaatgagttaactacacgcccaataagcgcttcgccaacaggaacttccatgattttaccggtacgacgaacttcatcgccttcgcggatttctgtgtaagggcctagaataatgataccaacatcatttgtttctaagttttgggccatacccattacaccatttgagaactctagcaattcaccagccattgcattatcgagtccatgagcacgcgcaataccgtcaccaatgtaggtaaccgtaccaacatcactcacttttagttcagaatgataattttcaatctgctgttttatgattgagctgatctcttcagccttaatgctcattgatttcacccctcgttaaacggaaactaggctttaatttgccgttccatgtcctttaatttcgtttttagactgtcatcatatatacgggttccaataaccactttgactccaccaagaagggatttatcaatgtgattttgaatgtttaattttgttttgttcattttcgtagcaaatactctcgagagcgccgtaagttcttgttcggaaagtgggacaacagaataaacatctgcatccgcaactcctcgcaagtcatttacgcgtttttggtaaacgtccgcaataacagaaagataatcttctctgctacggtcgattaaaagataaataaaatctcttaatgtcggattgattttttcaaaaacagcgctggcaagatttttcttttgctcggtcgtgaaagtaggattttcaagtagttttacaaaatctttattagcttttaaggccgcttttaattcagttaattcttctgaaaaaacgtccactaaatctttatcttgagctacttgaaaaagcgcattggcatagcgacctgcaacttccaaatctttactcatttgtcatcccctagcctttcgatataatcttggataaggttagattgttctttttcatccagatttttttcgatgactttcgatgcaataagaacagataaggaaccgacttgttcgcgaagagcagaaatagcatcttctttttcgcgtgcaatatcggattttgcttcttcttttatacgttctgattcacgtctagcagttttgacaatttcttcgcgttctttttcgccaagttgttttgcgttctcaatcattgtttgagattccacacgagcttgttgtaaaacacttttttgttcagcaagtaatttttctgattgagcgcgattttcttcagccgcatcaatttcagaaccaatatgctcttcacgctctttcataatacccataagcggtttccaagcataaattcggattaaaactagcaaaatcgcgaaagcaaaaagtgtaaagaatgcatcaccaaacgtaaatgcggaaccaattactaaatgtggttgtaacacgccagtttcactcctttctatacattcgcttgaattattcgttcaaaacgaaagagatgaggttttatttcctcaacttccttcaaattatttattaagaaccatgaacgcaataacaacagcgatgataggaagggcctcaactaacgcaacaccaacgaacatgattgattgaagcatagaacgcgcttctggttgacgcgcaacaccctcgacagtttttgatacgataagaccattaccaatacccgcacctaatgcacctaatccaacagcaatagcagctgcaataacacctaaagacatataattatcctcctaatttttcttaaaattattttttattacttttataagtgacttaattgaaagttagtttaatgttcgtcactgaccttatgtgacatgtaaaccattgtcagcatagtgaaaatgtacgcttgaattgccccaataaagagtgagaacgcctgccatataatcgctggaattatcgcaagaacacctacaaatatattaatatgtgcaagttgagtagcaataatggttaacaaaacttccccggcaaaaatattaccgtaaagacgtaaaccaagcgttaatgtattagcaaattcttctactaattttagtgggaataaaaatttcattggactcaagtaagtaccaacaaagtagtgcttgaaaccacgcattttaataccgtagtaatgcgttaagccaagaaccattatcgcaagtgttaatgtgacaattggatccgctgtaggtgaacgccaccatacttcatcgtttactgcgatttgtaatggtagtcctagcatgttggcaacgaagacaaacattaatatcgtaataccaagcacatggaatctcccaccggttttccaatccatattactattaataatacctctgacaaaatccataacccattcaatgaagttctgctttccggtaggacggcgttgcagatttctggtacagataatggctattagaagaacgatgacacaagtcacagtaatcatcaaaatattagatagattaaagtcgatccctaataggcttatcgttggaaattcctcttccaattaggttcacccctctctttttaaaaacttttttctgtggtacatggaatacgcaaaaaaatctagaaaaataattgcatatgcaagcccaagtccgattaccatgctataaacatgaaaaaattccggcagttgcgtcgctataattgtagcaagtaacacgcttcccatccgtaacgtcattcccattccataaaaggaacggttttctgccaaagctcttgtcattgcttgtgttcgcctcattaatatccagtagttgaaccagccgacgattaaccccaatttaagtcccaagaaaatatgtatatgcggggttaaaaaccatccacaaagacaaatagcaataaaaagaaccatatacttctgatgacgatgatacatgccgattagcgattctaacattcggggcgcaatcctttctttttcaaaagatttttctttccagatgaccattttgaaatctcagggagtaagtttggtttgtgaaaacaagcacattttccccaattcatcccaatcccaaacacacatgaaagccttatcagcgtgtcagttcttagcatacaacagccaaaagagaaaagtcaatacactttcacaaattgtgagtacatctattactaatagtaccacaatcggacccatccataaaagaatagcctattatttctgagatttttttgatttcaaaatctatctgtttcttagattgccacgccagaattatttttgtccatttaacagcaaccaacacctccgtaatcattgggaaagcttgtctcctgttcgtgtgatatttcacaaaaaaggctacaaaaactttctttcgcacaaataaaaaaacttctaccactattggtaaaagaattcgatacgattattcgcaaatttcgcgaccgaaagttcttttcccaagaaaaagaacggaaaaaacagccggactcacttatcatgagctgcattttgatatagagtgcccgtataaattccaattcagtcaacgcaaacctagcgtcggcgggattgtagtgaatactgagcgcagtcttctatccctatgctacaaacaagctattttttgggctcttatattaataacattgaccatcttatcacatgtaacataaaagaactagtgaaaatcgagcgtgtaacatatctgtaacaataaggcgctttcattccaaataaagaggaaaactagacttttaacgcctagtttcccgctgtgttttacacgataaaatcttctgggcgatcagtttcttcaaagtgactcttgattgctgctaaaattctgttcgcagcgaaaccatcgccatatggattagctgcttgcgccattttatcgtggctttctttattatcaagtaaatctaatgcttctttgatcagattttctttattcgttccaattagtttcaacgtcccagcttcgattccttctggacgctccgttgtatcacgcaaaactaaaactggcacacccatacctggtgcttcttcttgcacaccacctgaatcggtaaaaacaagataagacttgcgtaagaaattatgaaaatcaattgcgtcgagtggctcgattaaatgaatgcgttcgtgtccacctaaaatcgccattgctttttctctaactgctggatttaaatgcatcggataaacgagttccgtgtcctcacgactttccacgatttctcgaaccgcctcaaacatcccttgcatcggttcgcctaaattttccctgcggtgagccgtcataagtattaaacgattgtcgccaagattttccaagattggatggtggtaatctttttgcacagttgttttaagggcatcaatcgccgtatttccagtcacaaaaatagtagccggatcttttccttccgcaagcagattttctttcgcttgtttggttggagaaaagtgaatatccgccattacaccagttaactggcgattcatctcttctggaaacggcgaatatttattccatgttctaagtccagcttcaacatgacctaacatcttttgttgataaaaagtagccagtccagcagcaaaactagttgttgtatcgccgtgaactaaaacgatatcaggattttcggcagcaataacttcattaattccattcattacacgtgaagttatttcagctaaggtttggccttttttcataatatctaagtcaatatctggtttaatatcaaaaatttctaagacttgatctagcatttcacggtgttgggctgtaataactaccgttgactcaaatgtttctggttctttttctaacgccagaactagcggtgccatttttattgcctctggtcgtgtcccaaagatactcattactttgattttagccaattttgaacctccttataaaaaaactcctcagaaatagctcgataaaaaattttccagtctgctaagaaacagcactgtttatcattccttatctcactaaaccgaggagagtgttaattatttagttccgaataatctatcgccagcatctcctaagcctggacggatataaccattttcgtctaacttctcatctaaaccagctacatagatttctacgtctggatgtgcgtcttgaagcgctttaacgccttcaggagctgctactaaacacatgaatttcatattgcgagcgccgcgttttttcaagcaatcgatagccataattgccgatccgccagttgcaagcattggatctacaacgatgaaaagacgttcttccacatcagaaggtagttttacaaaatattctactggttcaagtgtatcatggtcacgataaagacctacatgtcctacttttgctgcaggaataagttttaaaataccatcttgcataccaagaccagctcttaaaataggcacaatccctaattttttaccagtaagtgttttagcagttgttgtttgtagtggtgtttctacttgaatgtcttctagttccatatcacgtgtaatttcgtacgccattaatgtagcgacttcatctacaagttcgcggaatgcttttgttcccgtatttttatctcgaataattgttaatttgtgttgtactagtgggtgattaattacgtgtacatttgccatcgattagttcgctcctttgatattgaaaatttccttctcttattgtatcagaacaagacacaagtgcaaggattaatttgctatacatgaaaaaaaccggttttctctatttatagaaaaaaccggatcacttattttataaacttggataaagcggatattcatttgttaaagtagccacgcgtgcttttacatctgcgagaacttcttcattttctaagttatgcagtacttccgaaataagtacgccgactttttcaatcgcaacttcatcgaatccacgagtcgtcactgcagcaacacctacacgaataccacttgttacaaatgggctttccgtttcgaatggaatggtatttttattcacggtaataccaacttcatctaatactttctcagctgcttttcctgttaagccaagtggttttaaatcaattaataataaatgattatccgaaccacctgttaaaacagcaacatcattcgcttgaagagtttctgctaatttcttagaattacgaataatttgctcgcaatacgttgtgaattcaggttgtaacgcttcaccaaacgccactgctttcgctgcgattacgtgcattaatggtccaccttgaattcctgggaaaatcgatttatttaatttttgttcccattctgctttggctaaaatcattccaccgcgaggtccacgaagcgttttatgggtagttgtcgttgtaaaatcagcataaggaactggattttggtgtaaaccagcagcaacaagaccggcgatatgcgccatatctaccattaagtatgcgccaacttcatcagcaatttcacggaatttagcaaaatcaattttacgtggataagcacttgcgccagctacaatcatttttggtttatgttttaaagcagcttcacggacgatatcataatcaatctcttttgtatcttcacgaacgccgtattcaacaaaattgtataaaacaccactgaaattaactggactaccatgtgttaaatgtccaccatgtgaaaggttcataccaagtacggtatcacctggttcaagcactgtatgataaaccgccatattcgcttgagcacctgagtgtggttgaacgttcgcatattcagctccaaataattttttcgcgcggtcgcgtgctaaatcttccacgatatccacgaattcacatccgccgtaatagcgttttcctgggtaaccttctgcatatttattcgttaatacagaacccattgcttccattacttgctcactaacaaaattctcagatgcgattaattcgatattcgcgcgttgtctaccaagttctaacttaattgcatcaaaaacttccttatcttgcttttgtaaatagaccatctgtggaccccatccttttctgataaatttttcaagtgaactattatgtattatctttaataattacttaaattgggtagaaaagcaagcattttggaataaaaaaaagcaatttccgttagtgaagcgcttcacttatagaaaacgttcggaaattgcactttttagttcgtaataggtaatttcatattgctcaattgatccaccgtaagggtctggaatatctgttttttcttcggaaattagttgaatcttatcattctctttcggaaaaaggctttttagttccgcttgatgattttgagtcattacgtaaatttgatctgcccaatctatatctgcttctgtgatttttttagcttgatgcgttgttggcaaattcatctgcgcgagaatttgacgtgagttttcagagatagcgtccccgttcaaagcacgtgtcccagctgaacgaacatctaaatctgggcgcaagttttgcaagattttttcagctaaagggcttcggcatgtatttcctgtacaaacaaataagacgttcattcagtaatcctcctattgccagcagctttttctaatcggttcataattgcggctcctagctccgtttctggatacacttctgcaaaaataatatctacatccgcgtgatcaaaagcccgcaaacctttgtaaagacttgtagcgatttcgtccaatgcctttatactaccagttgtttcgatggtaccgctggtgtttagttgatttatcagttcttttgtcgccaaaataccgagttttttattcgcagcttccgctttatttatttcactttgccaaaattgggtagatccttctattagataaactggcgctttcggggcatagtgagtatatttcatgcccggagcttttggtttttctgtttctttcgtgttgtttgtcgatatatccacaggaccaattatttgttcaatctgttcttttgtaacaccgcccgggcgcagaataattggaatttctaaggaacaatcaataacggtagactctaaaccaacaccagttgcgccaccatcgataattccggcaatttttccatctaaatcttctattacatgactcgccgttgtcggacttggttttcctgaacgattcgcgcttggagccgcaataggaatattcgctgtacctatcaacgctagactaacagggtgttccggcatacggacgcctactgtggataaaccagcagaaacattagttgccaaactatcttttttcaatggaagaataaccgttaacggacctggccaaaacttttccatgagttggatggctttcgctggataacttgctacaaattgatccatttgttcacgacgggcaatgtggacaattaatgggttatcagacggacggccttttgcttcatatattttttgaacagcagcttggttggttgcgtctgcgccaagaccgtacactgtttcagttggaaaagccacgcattcaccgccttggagtaatttggccgcttcctgaaagatagcttgatttgattgttgcttatttatgttccaatgaatggtttgcattaattccggtcccctttacataacttctattatattttaacgttttctgtcttatttttacagtactgttttttaaaatctggaaatcgctatttttgaacaaaagttatccccaaactgtggataataactttgtcaatggggataacttcttgtgaaatgtggataattcgtaaagataagtaaaaaagccatttttttattaagatttgattaaaaaaaattttttgcacaacattttatccacagttttgtggataacttccaaaagaaaaagacgcttcttttatagaaacgcctctataccaatatattagagcatgttacatagcggtctttggaattgatatctttgtggataacaacagtagtatgtggataacttttttcaaataattgttttacacgttcaccttgtgtataacctatctccacacccacccaaaatgaagaatttaggacatattttaagttatccacaaatcgctcatagatagcaagtccatcattttcagcaaacaatgctaatgaaggttcgttttttagcacataatccgacatttctgctttttctgcttcagaaatatagggcggattggcgacaatcatatcgaatcgttcttcgttttgtttaaatgcttcaagtaaatctgtttccacaaaacgcacatccgcatttaataacaacgcattctttctggccactacaagtgctggagcggaaatatcagaagccgtcactgaaatctcaggaaatgcttttttgagtgcaatcgctataatcccgcttccagtgcaaacatctagcacatttttaactggatgttttttcaaaaaagcttccgcacaagcgactaactcttctgtttcggggcgaggaataaggacatcttctgttactaaaaaatcatagccataaaaaggggctgtttttaaaatatactggaccggctcgccagccaaatacctagcaaaatcttcctcaaactgcttttcatgattcggttcaagttcacgacttatttccatccaaagctcagaacgagaaagccccattctggtttctagtaaaatttccgccgcattttggtccagccctttttcaaaaaggatggcctccgctttttttaacaattgactaatttgcgtcatttaaatgctccagtttacttgtttgatcttctaggatgagcgcgtcaatgatttcatcgagtttgccttccatgatttgatctagcttttgaatggttaagccgatacggtggtcggttacgcggttttgcggatagttataagtccggatacgttcggagcggtcacccgttccaacagctgacttacggttggcatcgtattcctcacgagcctcacgctcaaatttatcataaacacgtgcgcgcaatactttcatcgctttatctttgtttttcaactgagaacgctcatcttgcatcgaaacgacaattccggtcggaatatgcgttaaacgtacagctgacatcgttgtattgacactttgtccaccggcaccagtggatgcgaatgtatctgtacggatatctttgtcatgcaactcgatttccacttcttccgcttctggcaaaattgctacagtcgctgttgatgtatgaattcgaccgcctgactctgtttcaggaacacgttgtacacggtgcgccccgttttcatatttcattcgagaaaaagcatcatttccgttcatcatcgcaataatttctttgtaaccgccaataccagttggatttgcgtccataatttctactttccagccgcgtgattccgcatatttgctgtacatacggaataaatcgccggcaaataaagctgcttcgtctccaccagctgctccgcgaatttctaaaataacgtttttgtcatcattaggatcttttggaacgagtaatagttttagtcgttcttccaagtctgttttttctttttgaagttccgcgaattcttctttggccatttcgcgcatttcatcgtctagtttttctcctaggagttcttttgtttcgttaatttgttcgttcacatttttgtattcgcggtatgtttccactgtcgctgtaatacctgattgttctttagaaaggtcgcgtagtcgctttggatcagatactacatctggatcacttagtagttcatttagttcatcataacggtcttccaccgcctgtaatcgatcatacattgtattccaacacctctttaacttattttattggtggattggcatgacatttgcgacacacagggtaatagtggtcatttccgccaatcataatttgttcacctgtataaactggttttcctttgtcatcaacgcgcagaaccatcgtcgcctttttggcacagaaccagcaaattgttttcatttcttctagtttatctgcatatagcagcaagtatttcgagccttcgaataattcgtttcgaaaatcattttttaaaccataagcaattactgggatatttaattcatccacaattttcgctaactgaaatacgtgttctttttctagaaattgcgattcatctaaaagaacgcaatttggttttggtttaatattcactacgatttcaaaaatatttgtgtcactaaaaataggagttgcttctcgtttcagtccaattcgacttgaaatgaagccaacttggtctctatcgtcaatacctgaagtaaagatagctactgttttattttgttcttcataattatgtgcgacttttagaatttcaatggttttcccactattcatggaaccataacggaaaaataattgtgccattaagaccgctccctttaactttataaactcttttcctattttatcatagagcggcacaaattgggacatatagttaaaaaaagctacgccgcatataggcatagcttgattttaacgaaaaacttctgcgccgcttccttcgacatcaagtagaaggacgtccgcatcgatttctagtgtttgtaaagatgtttgcagtttattcgcgaggtttcgaggagcgaacactaggacagttggaccagcgccgctcaaacaagcagcataggctccttggtttttggctacatcgcgaatttgtgctaaatgtggcactaattgactgcgatatttttcatgccataaatcacgttccatcatttctccggctaatgtcatatcattgcgcaaaatcgcggcaatcattacattggcgatactactagcttggacagcttctttgaacggaagcgtatcaggcaaaacaccacgactttccgaagtaagaagttctgcctttggaataaaagcaattaaagcacaatccggaaaaaggtggcgtacatagaaatcttctccatctaatttcgcccctacgacccagtttccaagaacagctggcgcgacattatcgggatgcccttctatttcagcagctatccggactttttcctcttttgaaaggttaagttcagcaagtgtattagctaattcaattcccgcaacaactgccgcagaactactccctagtccacgagcgggtggaatatcacaggtcatcactaaatgatgcggcgttaaattaggcgccagatttaaggccgtttctataattacattggtttcatcatgcggaatcccgccgccaatattatgttcgatataccaagagtctgcttccgctccaatatcaagcgttaaatataacgttaacgctaaaccacacgaatcaaagccagggccaagattggctgttgttgccgggacacgaatacgcattaagctttcactcctgaacgtaaatgtgtgcgcattgcttcaatatcatccacatgggaaattggaatttcatgcacactcatcgcagtatctggatcttttaagccatttccagtaaagacacaaacaactgtttccccttttttaattgttccatttgctacatgttgaatgacaccagctaatgaagcggcagaacccggctcgataaagacaccatcttgtgctgcaatttttttatacgcattcacaatttcgtcgtctgttacagaatggatgtatccgccagattcatcgcgagctgcttctgcaagcccccaactagctgggtttccgatacgaatcgctgttgcaattgtttccgggttatcaattggtttcccttgaacaatcgccgcagctccttctgcttcaaaaccatgcatccgcggcagtccagaagctttagcctcattccattctttaaaccccttccagtatgcagaaatattcccggcattaccgactggaattgcaagtacatctggcgcggaacctaattgctcacagatttcgaatgcagctgttttttgaccttctaaacgatatggattcacggaatttacaagtgttactgcttctgtttcagctaattcacgaaccgattttaatgcttcatcgaaattaccttgaatcgagataatatctgcgccatacataactgcttgcgctaattttcctagagcgactttgccttctggaataacaatgtacgcttttaatcccgcacgtgttgcgtatgccgcagccgcagcagaagtattcccagtggatgcacaaataaccgcttcggcaccttcttctttcgctttagcaacagccataaccattccacgatctttaaaagaaccggttggatttaagccttcgtattttccgtataaagtaaccccaagttctttggacaaattcggtaatggaataagtggtgtatttccttccgcaagtgagatcattggcgttttatcagttactggtagatattctttatatttttctagtaaacctttatacatatttaaccctccacaacggaatattttgcgagcatttgcatttctggctcatctttgaccctagcgattgcttgttctaattgcgcttgacttgttgagtgtgtcacgataacaacggtcgccgtgaaatcatcatacggttgttgtaaaattttatcaaaaccaacgccggcttctgcaaaaatttgcgtcaacttaaggaaggttcctgttttatcgtccattgttagacgaagatagtatttagagaaaacttgttcctttggtgtatgttttgtttcgtgtttgtagctgttgaaagcattaccgtttgtacctagacggctatttttcgcaacagtaatcaaatcactaacaacacttgtcgctgttggtaattcgccggctccgggaccataaaacattgtttctccgacagctgcacctgttacaaatacggcattattttcatagttaacgccggcaagtggatgtgcttttggtaataacactggtccgacattgacgttaactgtgccattcgtttcttcggcagtacctactagtttaattttatagcctaattggtacgctacttcgatatcttcaggagaaatcccacgaataccgtttgtttctacattatctaaattcacattcattccaaatgcgagtcttgtcataataaccatttttctagctgcatcgattccgtccacgtcattcgttgggtcagactcggcaaagcctagtgcttgggcttctgctaaaacatcttcgtatgactttttctctgtcgtcatttttgttagcatgaaattggttgtcccgttgacgatacccattactttttgaattttatccgccgctaggctgtttacgatagtacgtaaaatcggaattccacctgcaacgctcgcttcataaaacaaatcacaattattagcttgtgcaactgccactaattcgtcgccgtgtagcgcaatcaaatccttattcgcagttactacatgttttccagctttcaaggcctgcaaaatgtattcccgcgcagttgtgatgctgcccataacctcaacaacaacagcaatctctggatcatccagtacatcagacggattggtggttagttcaaaaccttttgtttcataacggcgatttttttctaagtcacgaactagcactttcttaacagaaatattgtatccagttacttgactaattttttcttgatgctcttctaaaatatgaataacaccgctacctaccgttccaaatcctaacacacctacttgtaactttgcttccacttgaaaacctccttattattgtttaacaaaacagaaaatttaacttttttattacctactcataaaaaaagtaattagtgatattatacgcaacttcacagggaaaagtaaacccttgaaaggaaagtttttatttttagtagttctgagaaataattccataaaaaaacacacccagcaaaagctgagtgcgcaaattatttcgttcgttacatacagtcttatttgagaccgtattttttgttgaagcggtccacacggccgtctgcagtcgcatgtttttgtttaccagtatagaacgggtgcgaatcagaagagatttcgacacgtagtaatggatactcgttgccatcttcccatttaattgtttcgcttgagctcttagtagaacctgacaaaaatttgaaatcagtactagtatcaacaaataccactggacggtactcaggatgaattccagttttcatttcttttcaactccttcgccctgaatcatctgaaacagagtaattaagtgcttttacacacagtatagatattataacaatgttgaagcaaacaagcaagattattttttcactttgaaaatgatccatttactaaacacataattaagtacaaggacaattacattcgtccaaatttttgcccataattcatttatagataaaacttcaattagaagaatcattactaaaatgtccactaaataagtcaaaaagcggaaaccgaaaaatgatgtaacttctcgagcgcgttctttccaagtaggtgtatagctttcaaaaacatattttttattagaaaaatatgcaaaaaggacggatgcaacccatgcaatggtgtttgcgatacgataatcccagttcaatacataagtacataaccaaaatgtcacgatattaataagtgttgtaaaaccacccatgattaaatacatcaagatactatgaatctcatccgtataccacggaatcttgtctaaccattttcttattttgttcatactatgtcttctttctctccgttatattcttctacaaaataaagcgggcgttttttcacttcattaaaaatccgacccaaatattccccaataatacctatactaataagttgaatcccgcctaagaacagtattgtaatcattaaagtcggaaatccgctaacgtcagaaccaacgataagcgtttttattactatatatatcaaataaataaaagtgcctaatgagatagcgaaaccagcaatagttgataatctaagtggcaatgtcgtataagaagtaattccttcaagagccaaattaatcaaggaccggtaattccatttggtttcaccagcatgtcttggcgctgcatcaaaagtaacttccacttttttaaagccaatccaattgtacaacccttttgtataacgttgtgtttctcttaattttttcaatgcatctacgcatcttctatcgagcaatctaaaatcacctgtatctggaagaaccggggttttagtcactttttgtaaagttttatagtaccactttgaagttgctttctttaaccagctttcgccatgacgtttatttcttcttgcataaacatcttcatatcctaattcccatagttcaatcatttctttaattagctctggcggatgttgtaaatctgcatccattgtaatcacagcatcgccttttgcataatcaaatccggcagccattgctatttctttcccgtaatttcttgaaagatctacaaaacccactcgattatcttctttatgtagctgctttactatttccagtgtcttatccttactaccatcattgataaataataattcaaaagtatatttatctttaatggaatccataacattcacaatagtttcatataatgtggtaattgattcttgctcattatatgcaggaacagatattgtaattagtttcattatctttctccttttcttttttccactcattactctaaaaacgatagtatcaaacctagtaaaaaaagtacagtttcaatttattttttaaacatttcctcttgtagtaattcataaaaagcttcattgttgtcggttttctttaagtaacggacaaagcgttctgaaatatcaagtccatcaccttgttttggcatggctttacggattttccatagttgttctaagcgttctttggataataaaagttcttcttttcttgttccagatcgacgcatatcaatcgcaggaaagacacgacgttcagcaagttgacgatcaagatgcaattccatgttcccagtacccttgaattcttcgtaaataacatcatccatccgtgagcctgtgtcaactaacgcagtagcaaggattgttaaactaccgccctcttctatatttcgtgctgctccaaaaaaccgttttggtctatgaaaagctgctgggtcaatcccccctgaaagtgttcggccacttggtggtataactaaattatacgctcgtgcgagacgcgtgatactgtccatcaaaataactacatcgcgtttttgctccactaatctcattgcgcgttcaagcacaagttctgcaactttaatatgattttctggaacttcgtcaaatgtggaactgactacatccgcttttacagagcgctcaatatcagttacttcttctggacgctcatctattagcaaaacaatcaattcagtatctggatgattagtcgtaatcgcattcgcaatttctttgagcaaaacagttttccctgcttttggtggcgctacaataagtccacgctgtccaaatccaattggagcaatcaaatcaattgtacgtgttgaaattggatatttttctgtttctaaatgaatttgacgatccggataaagtggcgtcaaaccaggaaaatgcactctttctttcgctacttctgggttttctccgttaactgcctcaacatgcagtaaaccaaaataacgttcattttcttttggtggacgaacttttcctgaaactctgtctcccgttcttaattcaaaacgtctgatttgagaagcggaaatataaatatcttccgagctagaggaataattaataggtcgtaaaaaaccaaatccctcattcggaataatttccaagacaccttccataaaaaagaaaccttctttttcggcgtttgacttaagtaaagcaaaaataagttctcgtttggtaagcttactataataagcaatcttatgttctttagctagggaatatatatctttaattgttaagctttctaagtatgcaatggagagtttagccattatgtaccacctttttgaatttaataattttattggaataaatgagggtgaggtaaaattgaggagaggctgaaacgagttgtttcgctcagcctctaattattagatatttgtttctgctgtactactacgagttatatctgcaccaatcgcagaaagtttttcgataattttactgtagccacgttcaatatgttcgacaccatgaatttctgttcttccttctgccaaaagtccagcaataacaagtgctgcacctgctcttaaatcagttgctgttactttagaaccttgtaattttgctggaccactaatcacagcagatctaccttctaatttaaacttaccgcccattcgttccagctcagcaatgtgcttgaagcgactcggataaatcgtgtctgtaatgacgctgctaccttctgcacgagttaaaagcgccgtgagtggctgttgtaaatcagttggaaatccaggataagcgtatgttttaatatcaactttttttatattctctacttcaccaataaaaatggaatcttcctcaatatccataggaacacccatttctgttagtttcgcaatgattccctctaagtgagttgggataacattttcgattcgtatgccttttcctgaggccgctgcgagcaccataaaagttcccgcttcgattctatcaggaataatcgtatgatggcaaccatgaagatgatccacaccagtaattcgaatggtatctgttccagcacctttaataattgctcccatatttgttaaaagagtagctacatcaataatttctggttcttttgctgcattttcaatcactgtttttccttttgcacgaacagctgctaacatgatgttaattgtggctccaacacttacgacatctaggtaaatgcgcgcgccttttaattcatctgcccgtaaataaatcgcaccctgttcattggttacttttgcgccaagtgcttcaaatcctttaatatgttgatcgatgggacgcggccccaaataacagccccctggaagtccaatgaccgcttttttaaaccttccaagcatagcacccattaaatagtaagaagctctcaatttcttcacatttcctgatggaagtggcattgaaagcatatcagttggatcaataattgctgttttgttatcataacggacgctgccgccaagttcttctaaaatatcataaagagtatatacatcagaaatatccggtaaaccttctaaaacaacttcagattccgccaaaatagcagctggaatcaaggcaaccgcgctatttttcgcaccgtctacttgcaaagtgcctgataattttttgccaccttgaataattaatctatccgtcacaacgtacccttctttcttgaagctagtaatactttattcattatccattaatttgttttactttgcaagattctttctccaaaaaaaagctaggaacaaatcattccaagcttcaatctactatggtaaattttttgcaggtgtttttgcaagtgcttctatgcgcggtttgattttttgggacgctgtatcttttattaataaagctcctgcaccaaaaacgatacaactataataagttataattcgccataagactagagccatgagtagtttggcaggtccaagtaacataccgaataacaatgtaaaagtgtactcagctccaccggccccgcctggagttggcatcaccgttgcgaacataataataaacgcatgataagtaatcgccatatacaaaccaattcctgtcacaccaatcgcttgtaaaataaagaatgggattgagaagtaaatccaaagttgcaacgttgtataaaaacaacaacgaacaattaatttccaatctttaccaattcggctactttcttcatggaaagtaataatcttctcatctaacgtatttcttaaattggaaactttttcttttttcataaataaacgtgttggtataagtaaaatgtgcactaattttgtcgtgaacttttggcttcttcctactaaaataagcgcagcaatgacaatcacatgcacaccaaaccctagtagaacaaggaatttcaattgtgtcacgccagtcattaagtaatgaataccaaaaatcaagataactaaaaagttcagcacgaccatcgcttggtaaataatgaattttacgagtaagaccgaacttcctcgccccgcatccatgccttgcttcgtcaacataacgagttgcgcaggctgtccgccagtcgccattggagtaatggtattaaaaaattggccaatcattgtaatccggaatgacgaaaaaaaacgttggtccttattcgctggtttggatgcagtttgtaaaacaaccgcttctaaaaaccaataaataaacattgcagcaaaggccgccaagagccaccaagggtttacttttaacatcgaagcaaaaaaagtggagatatctacgccttgaaattgccagataatgaagccgatgctaattgctaatacaatcgcaatattaaataagtttttctttgcgcctccactcattacctttcactccttcgttaataatccttgataaaagcctaaccatatttcagctagtcgatcctctgaataataagcagctcctcgttttgcagcttgtaacatttcattataatagtttgtatcattttctaatcgttcgatagccctaataaatccagggttatctacttctttcacataatagccgtctaaaatttcttcatacaaatctaaatttcgtaataatatcggaacatccgaactcatcgcttccaaaatcgccatcggaaatagttcgttgtaagatggcataaagaacacatctgccatattaatacatgtattcatttcagaacgatccacaatcccaatgaaattaacattatttggtggattatcatagattttcttcaattcctcgtagccagaagtgattttaccaaaagaaaatccgcctgcccaaacaaattgaacatcaggaagttgtttagcaacctcgataaaatcaagcacacctttacgatgctgcacttgaccaattccaatcactgtaaatttatccgccggaattccatatttctcccgagcaagttccttctctgtttttgaaattgggaaaaagctctttttggaaacgaaattcgggatataatgaattttttcttctggaatattataagccgtaagtttgggaataaaagatggattcacaacaacaatctcatccattcgtttataaaaaccaatcaaatatttatagaaaactacgcgagcaatccaaggtaatttgaggctcccttccattgtttcgggtaaaaaatggacatatccgacccgaacgcctcgtttcttcttaaaaaaagtcgaaagaaaaaaacggaaatcaacggtatggtaatgcgtgatatccgatttctcaaaactattaatcttcatatcaatttcattcttatatcgttcttctagcaaattcacaagttcgcggtaagctgatgccacaccctgaccttttactttttctgccgaagatagcattgtcaacttaatcacgccgcgatgacctctctttcctttgaacgtgtgtagaagatgatagtgaaaatacttgtgaagctattttactttttattagtgtgggctttactttaatcgtcccattttgtcgctttactcggtatatttcacgaacttcattgtatgtagattcaatgttgattccaaattgatccgcagaaatggattccacttttactcgaccattcgtagcgaccaatgtggctgtatttttgtctgaaagtatatttattaacagtgatgcaagctcatcatcttcattgaataaaaaggctgtttctctgtcgcttaaaaagccttcaatgctttcatcacgcttggcaacaactggtaaagaagcggccattgcttctgcataagtcaaaccttgtgtttctgtcgttgaagcactcacaaacagatcccctaattgataatataaactaatattttcccagtctacagctccagtgaaaataacatgatctgctaattgtttttcttctactaatttttctaagtctttacgcacagggccatcgccaacaataaccaatttggctgttgtttttgtttgaaggacttctggcattgcattaataatcgcatcgatatttttttcatgcgcaattcttccaagtgaaagtatcactggatcattttctccaataccaagtaatttcttcaagtctagaattcgctgtttctcaactggcgcgaacgatgaaatatctgtgcctgttggaacagtgtacattaatttgtggataccttgttcttctaagtggtgtcttacttttgcagttggagtgattatggcatcatagctatcacagaatgattttgtcattttacccaccatagaaggtgtcaaaattttacctttcgcaatataatgcaagtaatcgacatacattgtgtggtaggtatggatagatggaatatgatattttttagcaattcgcttacctaaaagacctaatgaaaactccgtatgtgtgtgaataatatctaaatccaagcgacctactagcttaataaacttattcattccagcaattgctacgcgacgttctggaaaaaagacaaacggaatacttggtaaacgaaatacacgtccctcttcgctttctctatcagcgtttgggtcggttgttgtaaatatatacacagtgtgcccttgttttcttagttcgttttccataatcattatcgatgtagctacaccgctaatttgcggactgtaggtatccgtaaaaatccctatattcattactatcgcctactctcttcctcgttggttcattcatcatttaatatattattataacataactatagtaagtcgtatcacataactaactacattatggctcatttatttagataaaacatgcgcctgaagcatgattttttatcgggaaatttgaattgattcggtccattaaatgaaagctatagttatcataccatattagtcttaataacgataattaaattccttctataaaagccctcgtaatacataaaaaataactggcaaaatcaacaagtgatcctaccagttatttttatatcatcataaagttcgtcttacgctttaccgttagaaccaaactcttgaattttttctgttacagttttgataatcgcgtccacaccagggccgattactttacgtggatcataaactttgtcatcagtagctaatttttcgcgaacagctgcagtccaaacgatttggcattcagtgtttacgttgattttgctgtgacctagttcaattgcttttttgatttggtgttcaggaattccagaaccaccgtgaagtacaagtggagcacctgtaagttcggagatttctttcatttcgtcaaaaccaagaacaggttcgccgtggtaaggaccgtgaacagaacctaatgctgcagcaagtgcatcaatgttagcttctttaactacacgtaaacattcttgtggatcagcatagttgattccaccagtaactccgtcttcgtctccaccaacagttccaatttcagcttcaacagatacgcctttagcgtgcgcataatcaacaacttgtttagtcattgcaatgttttcgtcgattggatggtgagagccgtcgatcattacagaagagaatcctgcatcgatagccgctttacaagaatcaaagcttgaaccatgatcaaggtgaatcgcaacaggtacagtgattttcaggtcttctacaagtccttcagtcatttttacaactgttttgaatcctcccatgtatttagcagctccttcagaaactcctaaaataactggtgctttttctgcttctgcagctttcaaaatagcttgagtccattcaaggttgttgatgttgaattgaccaacagcatattttccagctaatgcttttttcagcatgtctgtcatgttaacgataggcataatacaatttcctccctcaggaatttaggaaaaccatttttgatttcccctaagatttgaatttccgccgtgaaaaatagtggcagctattttcccctaacaaacatatgataacagatttgtgatgaatttaccataaaaactagaaaattttctggtgtaaacgctttagcctctaagacgggaagaaatccgatttttatcagcaaatacttctaatgcttctgggattacctctaatgtatacggtgcttttcctccatacacaccatcatagctaacatttaaatctgcgtcgctgtttatagtaaccttatttgtgcgcgcatggattacatgcggactacttaagtgtgtgcccttctttattgaagcaaataattgaaataattttttaggagagactttctttaaaattaataactcaaacattccactatttaattcggcaggaggacacaatgtctccataccaccgaccgagttggacttatttacaaaaaacagcaaaatcttacctttaaatatttcatcgttatatgcaatttcgacgtacactggtgataattttggaagaacagttaaaccgctaaatagataagcaagtctgccccatttggatttcattgattcttttacagcataagttatttcggttattttcccaccagctgcgttattaatgaaaaattcggtctcattggctttaccgatatctacacgaattgtttcttgtttggctataattcgaagtgcttcgagtggatctttagcaaaatttaacgctctcgcataatcattcgtcgttccaaccggtaacactcctagtttcggtggagtatcaacttgcatcaagccattaacaacttcatttactgtaccatctccacctgctgcaattacaacttcaaaaccggcttctgcagcttgtttcgcaataaatgtagtacttttaggtgctggagttgatgggactaaagttacttcaaaatttgcttctgttaaaattttttctgcatccggaagtaattttctaaacttatttttccccgctgccggattgtatattatcatcgctttcttttgcaaattgccgctccctctttcctctatatataatttagtttcctattttgaccttaggatgtcaacttgtttgactgaaagaaagcgctagttaaattgaagggctttttacctattacaattcacatacgttagattagttaaaattacattttgggataccttatcgaaattttattacttttacagaaaaaaacatacgtaaataggttcattgttaccaatatccattgactacaaccagacgtgttgtcataattagaaatagaatacttttatttaatataaaaagtagtgcagttaggagaggatttaaactttgaaaaaattagtaaaatcggcggttgtttttgcaagccttgtttttattggcacctccgctactatgattacagaaaaagcaagtgctgcttccattgatccggtgcaaaaagtagacggtcaagctacttatatccccaaaggagttagagatgggactgcaacggaagaacatgacggctttgaagatggaactaatagcgtactacagcaagtccctttgcttcgcgcaacaacaggataccctgatgttaatgcctatattaaatcaaacaaattttcaacagcaaaaatagaaaaacaattaaaaagccaatttcctaaattcaactatcgtaatggttacggcaaaccagaaggaatagttattcatgaaacagcaaataattcatctactattacaggtgaaatcaattacatgagcaccaattacaacaatgcctttgttcacgcttttgtagacaagtctcgtataatccaaatccatcctactgaaaatggtgtttggggagcaggacaatatgctaatgctcgttttatccaagttgaattagttcgttcgaagactttcgatgaatttgctcgttctattaataactatgcctattatgctgcgtaccttttagatcaatataaccttcctgttgatagcgcgcacagtgatggcaaaggaacagtctggtcacatgatgcagttacacgttatttaggcggaacaacccatactgatcctgtagcgtattttaatcaatggggctataacttcaataattttgttagtttgattaacgaaaaatataaagcaatgcaagtaaattatgaaaaaatcgaatatgataaagcaatcactgcctatagccgagtcaaaacagcaacaggcaattctgtatggactaaaccaaataaaacagagggtgctaaattagtaaatccactttcatcttattctggtaaaaatttgcgtattatccgtgaagcaaagacatccggtggtacaatctggtatcaatttagcattggtggaaaaacaattggatgggtagactccaaagcccttaatactttctacacaccaagtatggaaaaaacaattacaggtactcgctatgtcctaccaagtaaacaaaccgttcattactacggactacctgtagaagactctgcgattgaccgtggaccactttcgaaattcaatggacaagctctaacactccaacgagaagctacgattgaaggacaactttggtaccgcgtaaaagatcttggctgggttaaagcggctaacttaacaactaccaaatatgatttaatcgaatacgacaaagccatcactgcatatagtcgcgtcaaaactgccgctggtaattatgtttggtcaaaaccaaataaaacagaaggcgccaaacaaggcagcgcactttcgacttattcagggaaaaacatgcgcatcatacgagaagcgaaaacatcaagcggtacaatttggtatcaatttagtattgacggaaaaacaattggttgggtagatacaaaagcactcaataccttctatacacctagtatggagaaaaatttaacggcaactcgttacgttgctcctggtcaagaaacacaacattattacggacttcctgtcgctgattcagccattgaccgtggaccactttctaaatttgcaggtcaaacactgactgttcaacgcgaagccactattgaaggacaactttggtatcgagtgaaagacctaggttggacaaaagcttccactttaactgcaacacaatatgacaaacttgagtatgataaagcaattactgcctacagccgagtcaaaacagcaacaggtaactcggtttggacgaaaccatatcgtacgtctggctataagttagttaatccactttcatcttacgctggtaaaaacttacggattatccgcgaagcaaaaacgtccagtggcatttggtatcaatttagcattggtggaaaaacgattggatgggtagactccaaagcccttaatactttctacacaccaagtatggaaaaaacaattacaggtactcgctatgtcctaccaagtaaacaaaccgttcattactacggactacctgtagaagactctgcgattgaccgtggaccactttcgaaattcaatggacaagctctaacgctccaacgagaagctacgattgaaggacaactttggtaccgcgtaaaagatcttggctgggttaaagcggccaacttaacaactactaaattcgatacgctttcgtatgacaaagccatcaccgcatatagtcgtgtcaaaacagcgacaggtaactcggtttggacaaaaccaaataaaattgaaggcgctcaaaaaataagcgcactttcgacttattcaggtaaaaacatgcgcatcttacgagaagcaaaaacatcaagcggtacaatttggtatcaatttagtgtcggtggtaaaacaattgggtgggttgaaacgaaagcactcaataccttctatacacctagtatggagaagaatttgacagcgacccgttacgttctgaccagcaagaaaaatgagcattattatgggcttcctgttgtagattctgctattgatcggggtccactttccaagttcagcgggaaaacgttaaccgttcaacgagaagctacaatcgaaggacaactttggtatcgtgtgaaagatttaggttggacaaaagctgctaacctaagtgctaaaaagcaataataaaaaactcccagccgggtatggctgggagttttttattactttatttatttttaagtgctgcgccaacaaaatctttaaacaagctttgtggacggtttggacgagaaatgaattctgggtgatattgacaagcgacaaaccaagggtgatcaatcagttcaactacttcaactaaacgaccatctgggctcgttgcagaaacaatcatgccagcttcttccatttgttctctatattcattattaaactcataacgatgacgatgacgctcttctacaagtgttgtaccataagcagcctccgctttggttccttgcttaatacgcgctggataaagacctaaacgaagcgttccacccatgttttcgatatttttttgttctggtaataagtcaatgatattatgatttgtttctggttcgatttctgcagaatgagctccttcaagaccaagaacattgcgggcaaattcaacagttgctagttgcatacctaaacaaataccgaaataaggtactttatttacgcgtgcatactcgatagcagcaattttaccttcaatggcacgatcaccgaaaccaccaggaactaagataccgtcgacatctttcatgatttcagcaacgttttcttttgttactttttcggaatcaatccagtcgatttcgatttctgcatcatgatcatatcctgcatgacgaagtgcttctgctacagaaaggtaagcatcttgcaaggaaacatatttaccaactaaaccgatacgaacttttttggaaaggtttttcacacggtgtaccaggtttttccaatcagtcatttccgcttgtggtgcttctaattgcaagtgttcaaggacgatatcatccattttttgtttttgtaaagaaagtggtacgttataaagtgtttcttcatcacgagattcaataacctcagaagctttaatatcacaaaatagcgcaatcttgtctttcatttcttgtgaaactggttgctctgtacgaacaacgataatgtttggttgaattcctaagctgcgaagttcttttacactatgttgtgttggttttgttttcatttcgcctgctgctttgatgtaaggaattaaagttgtgtggatataaagtacgttttccgcaccaacatcccctttaatttgacgaattgcttctaagaatggtaaagattcgatatccccaactgttccaccaatttcagtgatgataatatctgaattggtcatgcgcgctgcacggaaaacacgatctttcaattcgtttgtaatgtgtggaataacttgcactgttccacctaagtaatccccgcgacgttcttttttaataacttctgagtaaactttaccagttgtcacgttgctgtatttatttaagttaatatcgataaaacgttcgtaatggccaaggtctaggtccgtttccgcgccgtcatctgtcacataaacttccccgtgttggtatgggctcattgttcctggatccacgttgatgtatggatcaaatttttgaatggttacactaagtccacgatttttcagcaaacgtcctagtgatgctgctgtaattccttttccgattgacgaaactacgccacctgtaacgaaaatatactttgtcatgttaaaaaaatctactccttcctgaaatgaaaaacttgcagggttctgacgattttcctgctggggtgggaaattgccagataaaacaatattgtgattatctctctaacgtatcaatcacaatttcaagtattttgtaaaccaaaataaaaaacactccgcctactttttaaaagtaagggagcgctgattctcataaatatccgtccctataaaagggagcccaaataaaatactactaatgatagcgttagaagtcaagtctttattttatgaaaccgccatcaatccattaactacgctaaaaaaaatcagacagatactttcccgctaaaatgggtgtatctatctgattaaaaattagttattatttatcttctgggtcttctgtataatccccatcagtataatcatcttctacagtcgccaagtcgccttcgattccgtctggtaaatgatcatcatcatcttcatcttcatcaagtagaacatctgcaagagaaatttcttcctcaccaagctcttccacgatttcttcatcatcgtagtcaacgtcatcatccaagatttcttcgtcttcatcttcatcatcgtctgatttacgttttttcttcggtgttgtttgtgtttgaacttcttcgtcaattgcatccattggataccacgcacgaagaccccacgtattatttcctagtgaaataaagtttccatcaatattcatatctgtataaaattgaacaagacgctcccttatttctgcatctttcaaacctaggaacgcttgaatctctttcactaattcagggaaaagaatggtttctttccgctgttccaaaataaaatgtgcaacatcaattaaagatagttcactacgttcttcttgcgttaagttctttaaatccaaaactggcacgccctttctatcgtaattccaatttatttagctgttattttttcgttcagcccaacttcactattttacatgttatttctggcaagtacaacctaaattttcttaattacatcaattcttcttgactattttatatccgatgtaaaagaaaaggatggccattaaaagaattgggatcgatccaagttgaaagtcgtagagaatatagattgcgacgcacagaaacacgaaaagcagcgccaaaattattaatcgcttcatcatatgctctccccgttttttcaattacctatgtttctattaactttagtacattttggttatgacgtcaacgagtaacctataaatttaggatatcacattttttctggtgctgatacacctaaaagcgtcaaaccatttctaagagtaatttgtgctgtcttaataagtgctagtcttgcttttgttacttctaaattatccatatcaagtactttattgctattgtagaaacggtggaaggcggatgctaaatcatttaagtaacggacaatacggtgtggcgctctttttgcagcggcttccgcaacaacgtccgcgaactcacctaacacttttaataaatcatattctgcttctgtttgtagtaagctcatgtcagcgtcttttgttacctctagaccttgttctttaccagaacgtaaaatgctagaaattctggcgtgtgcatattgtacataataaactggattatcattagacgtggatttcgctaaactcatatcaaagttcatatgtgtatctgaactacgcattgcaaagaaatatctcgtcgcatcaagcccaacttcttcaatcaagtcacgcatcgtaacagatttaccagtacgtttactcattttaacttgaacaccgtcttcgaataagtgaacaagttgaataatttctacttctaattgattgggtgagtaacccagtgcttcaatcgccgcacgcattcgaggaatgtaaccgtggtgatcagctccccatatatcaattaatacatcaaagccacgctctaatttgtttaggtggtaagcaatatctggtaagaaatacgtataactaccgtccgatttgattaaaacacggtctttgtcatcttcaaaatcagttgttcttaaccacgtcgcgccatcttgttcataaatatagccattttcgcgtaaacgttctaatgctggtagcactttattttcttcataaagagatgtttctgaaaaccactcatcaaaagaaacgcggaattcttctaagtcagcgcgtaatttccctgtttcaaatgctaaagcatccacacggaaaatggaacggcgctcttcttcgcttgtgtgcacatatttatcgccgtatttagcagctaaatcttttccaagggagataatatctgcaccgcggtaaccatcttctgggaattcagattctaagcctaacgcttcaaaataacgtgcttctgctgaaagaactaaattattgatttgatttccagcatcgttaatgtagtattctcttgaaacatcaaatccggccattttcattatatttgctagtgagtcgccaattgctgcaccacgagcatgtcctaaatgcaagtcaccagttgggttagcggaaacaaattcaatttggaatttttctcctttaccaaaatcagactctccgtattttttatcttcggttaaaataactggaactaaatcagttaaataagcattatctaagtagaagttgataaaaccaggtccagcaatttctacttctttaattaatttgttgtctttttttagttctggaacgatactttcggcaatttgacgaggggctttcttagctactctagcaagttgcatcgcaatattagtcgaataatctccatgctttttatctttaggtacttcgagtaaaatttctggtacttctgtttcttctaaaccaaccgcttgaacaactgcttgtttgatatgttcaattagtttgatttggttctcttgcatgacattcattctgcgtcctcctctattttcattaaaacagtatatgagccgatgtattcgccgtggcttagcaaatcatattgaaaagctacttcgctcaatacatctggcttattttcatatagttcttccattgatactaattctgattctaattgtaattttcctgcccccgaatcaacagacgcagtacttctccgattatctcgaaaaaagtgcattctcatatttacggcaccacttctcattaaaagcagttcgttgtcagcaattttaagaaccgtacgaattgttccagctaattgtttttcctcataatgcagataacgattgcctttatcgcggtaaaaaacacccgaaacagacatatcggatttctcttctgcatccatctgacggatgacattggtgatatgaatagttactttttttcgttccatttgattagctgtcatatcgcttatttacccctttccggtcagaagaatagacgcattatattatagtgaaaaatagcatgaaaagcaacaggttaaaatgatgtcagaccaaatattgttaaaataacatttaaaacaaacggaataaccgtattaaaaattggctgaatcgtaaatgctgaaataggcgttaatgcaactactaagaaaataagcatcgcatagcgttcaagtggttccagcttagacctggttgacattggtaaaaactccactaatatttgataaccatcaagtggtggtagtggaatcaagttaaacacaaatagcactagattcaattgcacaaaaatcattaaaaaagtttccgcaacggagccatatgtaaagaaggaataatttagaaataaagcatagaaccccacaccaaccatcgcaagtagtaaattacttactggtcctgcaagcgaaacaagtatacttccaaggcggcgtttttttaatttaaatcgatttaccggggtcggcttagcccaaccaaaacctgcaattaatatcattagcaaaccgaataaatcaatatgtaccatggggtttagagagagtctcccctcatttttggctgtatcatctccaaatgcgagagcgaccaaggcgtgtgcccattcatgaatagtaaaagcaattaataatgtaactaaaacatacggtatcatttcgagtggatacgcgagaaaactaggcataggagcctcctttatcttttattgagtaatttttatatgctataatgaaaaaaacgttgattgaggtgagaaaatgccatttgttaccattcaatttttagaaggtcgtacagacgatcaaaagaaagctttagttagtgaagtaacagaagtagtttccaaaaatctaaaagcaccaaaagaaaacattcatgtgattttagaagaaatgaaaaaaactgattacggtgttggcggcgtaagaaaatctgatatttaagtgtgtaagaagcaaggcaaaatgccttgcttttttatttttcctttaacgaatgcgcatggatgagggcaatcattctttctgtaattgcttggtctacatcgccactttcgataaaatcgagcggataatataatttaatatcggttcgacgctctcgaccaatcgcctcaacaaccggagactcggtagataactcacgcaattcaccatttcccatcaatagtttaattgggtctttaccgcttcccactcctggaagatagtaatcataaggtaaatcgctggaagaatcaattactaaataatacgacggatcaatatcagctttttcaagaagtccttttagttctgcgtaaagttctgcatcttcttttggatcgtagttaatgtatcgcaacaatcttctgttcaaaaagcgactacataaatcactcaaaatcggatcttcttcctcttgccaaatggaaaaatagtacatcaacacaatatcatcaagcacaatataatcttttaaactcacttcatttaaaaagaatggtagcacttgaacgggagtaacttgaaattcatatccagcgcaatataactttttggcacgctcaagtattttccataatagcacttccccactccgactaactggatggaaatacacttgttgatacatttgataacgactcataatatagtcttccaccgcatgcatgccagaatatttcacaataacaccattgccatctggactagggcgtagaactcgcaaaatccgttctaaatcaaactttccatagcttactccagtataataggcatctcgcagcaaataatccattcggtcagcatcaatctgactcgaaatcaacttcaccaatgtttgattcggataatttttcttaataatagcagcaaccttaagcggaaattcttctcctgctctcatcaatacttcactaacttccgtatctccaataattatctcttgagtgtatgcttcatggtccgttccaaaaactttttcaaaagcatgagaaaatggcccgtgacctaaatcatgcaaaagcgctgcacacaatgccaccatgcgctcttctggattcagttgcggttcattcgcaaatgttacatcgattatttgccgaacaatttcgtaaacacctaatgaatgattaaaacggctatgttccgccccatgaaaagtaagtgaagttgtccccaattgatggatacgccgcaaacgctgaaactcttttgtggcaatcaaatcccaaactatcttatcagaaacatgtacatatccatgaaccgggtctttgaatactttctcttcccttagtttctctgttaaataactcatacaacctcctcctctcaagtaagcactttatcatttcgggcaattaaacgttcgtaataggctgggaaaagatctaactcttcagacgtaagcgtaccagatacaagatcacctgcgtaatgtcgcaaactattgaaaagacgtaccaacgtcccatttaaacttatatcatttttcattaagtccgaaagcgaacccataacattcggattcacatctggaaaagtatattttgtttgctttgcttttccgctaatcgtatagaaatcgcgaatcagttctgagcgagtagtttgatccccgtcaatagctaaataaatttggaccgctaccccttttgccattctacgctgagaaataccggcaaactttttcccttgaatactaaggtcataactaccaggacaataagagtcttctatttctttcgcttcaattacctcattacaatctacgaacatgtctttgattagtgtaaacatagtttcataaccacgttcaatcgcaattccgcgttctgcatctggaagaaccattgacaaattgagcacacctgagtcaaggacaacagctagaccaccagaatttctaactacgacgcggtagccttgtttttgcaaaaatgcaattcctttatctatatcaggcaacttagaatcttgaattccaagtgaaactgttttttcatgcacccagccccgcacggtagacggcgccattcttgctccgaccgaacgacatagggtatcatctgtcgcaaacgattgaatggcatcgaaagctggattaatcgttgtattatcaataaaacgccacacatcttgttttagtaaggtgttttctatattcatctctatgtcctccatgattttctttttgttattatagcataccgacagcaaaattagatacaaatggcttaaaatagccatttgatcatgaataacaatttttgagcggttatttgacttttttacgcttaatgttgaaaactatggctgtaatgactgatataacaactgatttgagaattatatcttttttcattttcatcgcctcatttcctcctcttattataacaaacttaccatacaaaaaaacctaacttctgtaaaagaaattaggttcaatatatctaaaagcctagggagcttttttagcaaatgtattaccagttgtaacggtcttcattatcgcgacttgggcgttttggagaattaccccacatacgataaagtagatatccaataccacctagtataaggactggaaataagaagtgaagagtgattccaacgatatcaagtacgatattaagtgcgataaatcctaaaataactgtaaaaaatattttccaaaaactattcatgatttttcctcttttctaattttatttactacttgcaagtggaacactgtttatttccttggcttggacgagtaattcgttgtcttgaacgacgattttatactgtttattctttttaagttgtgttgttgacatgaagttaactttgtgactgtttccttgattatctaaacacgattcccggaatgagtaccctttaaattttgacttggtaacttcttttccatcgtttttgattgtaacgtaatatgtatttgctgccgatccaattggtgctgaaaattcaattacaaccattgttaatacaaaaattgcagccagtaaaccgaaaagtccctttttcattgtttttaccgtccttttttgttgataggttaattatagaggacatcccaaaaaggcacgaacggctctaggctgaaaattggtacatcctaagtcttattttcattcgggtataaaaaaggagtctagtatggttaactagactccttttaaattaatttttttcaatccacttgtagttttctgaaccgattggatatgtggtgtagtttttcaaattgcttttttgcaagtacgcacggccaccttggtaaagcgggataagtacggcgttatctttgagtaaaatttgttctgcttctagtaatgcctgccatcttttttctgggtcagctgagagtttacctttcgcgccaaggactagttcatcgtatttcgcgtctgagaaacctgtatggtttcctgggctgtttgtgaggaataggttgagatatgttaggggatcttgataatctcctccccaacctccaagtagtagttcaaattcttgtgtaacgtcagcttggaaactagcttgattcgtaacattttttagtttgatagttagtccaggaaggttttcttccaattgattttggataaattctgtttgtttacgttgcaaggacgtatctccacttgttaaagtaagtgttaattcggatttcccgatttctttcaaaccttgcttccaggcatttgtagcttcttgttgatcaaatttgagtaaatcgccgttttgtttgcggaaatcttcttttgtttctgggtcaaacatgatatcaccgggaacatccccgtttaatgctttagatccatttgcaagtagtgtattgaccatgccagtcttatcgatagccatcgctaaaccgcgacgcaagtttaagttagctaaatccgttttcacgccatctttgccttgattcattttcatataaacagagcgtccggttgcttctttatggaagtttttatcgtctttatattgtttaacaaattcgccatcaagctccacacggtccaatttgtttgtattgtataagtttaaagccgcattagtatcttttacaacagttacatggattttttcagttggaacgttctttttatcccagtaagtcggatttttaacgtaatcccatgtcatatttgtgccattccaattttctaatttgtacgggccattggaaattaatgtgtcgctttttgttccgtaacggtcaccttgtttttccacgaatgcttggttttgcgggaagaacgtgccagtcgttaggagttctttgaatattggcacagggttttctagttcgatttgtagtgttttgtcatctaatgctttaattccaagttcatctggtgacatttcaccttttaaaatttgggtagcatttttgacgatttcctccatttgcggtccatacgcagcggccgtttttggatccaccacttttttccaagcgtactcaaaatcttgagccgtcactgggtcgccgtttgaccaattggcatcttcgcgaattttaaaaataagtgttttcccgccatctttttcttcaggttcactggcagctagagctagtgccggttttccgtttttatctaatctgtataagccttcaaaaatttgattaattacccgaaaacttacactattgtctgcgagcgttggacttgcatttggaattccactcgtttccatgatgttaaccacttttgctttcttatcggatgttactttttcactttcccctttatcgccagactgacatgctgtaagtactagtaaacatagcaaactgagtgccactaccatttttctggctgttttatgcaatatttctcctcctcttttgtaagcgctttttgattacgcaaaaaaatgacggacttcctgccaaatctacgcagaacttccgccaccattataaaccgaaactgtatcaattgtaaataaaaactgttatatttttatttcttgttaagataaactcctgaaccaacaacaataacacacatcgtcatcaacattgctaacattaagtaactggggtcattacgcataaacaaagcgaggataaaacagattgtaccagctatattaagtgtaacagttgtgatttttctaagtaggtttcttgaccatgcatcgatctttttaaaaccaatcatcgttaaaaatttaaagagttttttcgagtattgaatgtaggctgcaacaacgaacatgaatgctcccgctgtgactaatgaaaatctaccagttgggatatcataacctagtgcgtatacaataatactcatttgaataatcgttagaagcactaacaacagcctaaagcaatattcaaattctagtaaactctcttggttcactttttctttcccgtaatattccgttcctgtaaacataatcattaaaaagggaatcagaattaagccaagccacttttgcataaacatatctggggagaagtccgtaccgaaatgcaccgccacttcagaaggtagtagcggatataacacagcagaaattcctactgtgaaaagaattatcatactaggaaatataccaactttcctcattcccctcacctcttccaatataattactggcaataggcgacaagttcctcccttgtttcgataagttgcactttctcggtatttgctaattgctctttcgtttcatcaaaaccttgttcagataatgcacgtgtcgctggtaaataaactaatacagaaaagcctgccctacttaactgtataaccgtagttttcacacaaaaatcaaaagctaaacctccaacaagaactaaatcgactttttgttcccgtaaatattctagaacacctgttgaaagatgttcgacgatatcgtggtaacaagcgccatacggatgaatgtccggctccatgcctttccaaataaagtaatcataatcagtaacaaccggcaaaccatctaataactcaaagccttttgtaccaggctcacagtgccttacccatgtccggtccgcatttggatattcgagctcagccagcatttcgtctttggaatccactacccatacagcattttgcggatgcgcgtccttactaccaattcgaagagaagcaagacttgccataaaattaagttctggcacaattttatctccacccgaaaccggtaattcatcggggcaaagcggcgtaaaacctttttgtgcatcaatatcaaaagcggcaattttcatttaattttcctccaagtttttatacgttagctgtgcaaactgtccgaaacgcgttacttcttcaagttctagcgcgtgttcctgatcttcttcaaatagtggaattccttttcctagaataatgggagcaatcgttatgacaaatcgatcaatggctctctcttttaaaaattgttgcactaattttgcgccacctacaagccagattttttcgccgtcgatattatttagccatgtatcaacagtgccagcaacaaagtcagcatattcatcttttgtcccagctttcgtgttggaaaaaacgtagacatcttttttgctataagggaatgtatcagtgagtgagaagatttgttgatacgtcgtccggcccattacaacagtatctacgttgtcaaagaaggcttcataacccgcatccccttcactatcaatagattctaaccattcgacacttccgttttcatctgcaatataaccgtccaaactaaccgcgatatatagtgcaacttgtttttcactcatcattactcaaatcctttcactactaattttccaatcatttttccggatgagataattttgtgagcttcttctattgtcgccgcgttcacgggtgataacacttgatttagagttgtcgttaaattacccttatctagcatatgagctgcttctgttaaaatttcatgctgtctgattttatctgctgtatcatatttcgagcgagtaaacatgaattcatagctgaaagtagcactcttatcttttaaaagagtcatttccaccggttcagtaagttccacaatcgagcaaattttcccttgtgggcgaatcgcttcttgcatctcatcccagtgagcacttgtgttatgcaaacataaaataaaatcaaccccttttttaaatccaagttcttccagttgttccgggatgttttctcggtgattgatgacatagtttgcgccgtggctcttagtccattctactgtttctgagcgtgaggcagtggcgatgacttcaagaccagtgtttgcagctagttgagtcgcaatagaaccaacaccaccagccccattaatgattaaaattgatttacctttatcattttcagtaatagttaaacggtcaaacagtgcttcccaagctgtaatagttgtcagtggcatcgcagcagcttcctctacgttcaagttatgtggtttcaaaccaactaaccgctcatcaattaaagtgtattctgcgtacactcctggtcttgtgacgtcacctgcgaaataaacgtcttgtccagtttgaaataatgtaacttcactcccagtatctactacttctccaactgcatcccaacctaaaatccgaacttcctctcctgatagcttagctgcttcacgttgtttagtatctaccggattgatggaaatcgctttgattttaactagtaaatcatggttttctggtactggcttgtcgatttctatatccacaaaatccgttgacgctttcgttaatcctacagctttcatttgacaacacctctcgtttccttttcccgaatttcttaaaataatgcacatttagataaaaaagcctcctcaaattcactgagaaggctttaaaacttatttttcgtcgagcaattcgctatctttgaatttcatttttgcatggcaggccgggcatttgatttttaacttgccgccatgtgaatgagtatggtcgctatcttcttttttggaaagaagcattttgctagctttttttagtagcgggatagcgataattacaccgatgattgtgaacattgctagaaccccgataaatactaaggttagggcacctatagcgataaaagcttttttcaaaaaatgacctaaatcaacttgttcttccatctaaaccaactcctctaattgatactttaatcatatcatgaagcggcattaattgcagtgatgatggtgagcgtgatttccttcaagttgaatcgtactatgttctaaagagaaattttcttgcaaataatgctcaatatctgccaaaattttatctcggtcggcatcttcgcatacggtcaaatgagctgaaagagcattgaaatcagaagtaatcgcccatacatgtaaatcatgtacttccttcacaccgtcttgttgctggaaaaacgttttgatttcttctgtatccacattcgctggctttccttccatcaaaatatgaatagcatctttcagcacgcgccagccactaactaagataagcgctgcaacgataacactggcgattggatcggcgatattccagccgaggaaaataatgagtaacgcggcaataatcgcaccaacagagccaagcaaatctccaagcacatgcaagaacgcactacgcatattcaaattctcgctagtgtcacctttcattaaaatccaagcgactaaaatattaataagcaatccgataactgaaatggtcatcattcccgctccaatgacttgtggcggatcaaagaaacgaccaattgcttcatagaatataaaaacagaaatcccaacgagcgttaacccattaagaaatgctgctaaaatttcaaatcgtttatagccatatgttttatcggagctcgctgctttttcgccaaatttgaatgcagctaaacttaaaccgagcgccacggcgtcagagagcatgtgccccgcatcagaaagtagcgccaaactattggtcataattccaccaataacttcgactaccataaatgtagcaattagaataaaactgataaataatgattttttgttggcattatgcgcatgattatgattgtgtccatgagcatgatcgtggttatgtgccatatgattacttcccctctgtaagtagctaatttctttatatgcatatgttagcatatatacattttaagtgcaaccattcttataaaaaaacttccattctttattggaatggaagttttttatgattatgaggatttttttctaaggtataacaaactcattaacactgcacttccacctaaaataactctaggaaatgacgttttatctcctgtttgcggtagtttggttacttctgttgctaaagtatcagttttccttactggaatttcaattgattcgggtttatccgtttcatcgccttcaaatgaaatagccccatttgctatgataggcgagttttctgcttttatgattactgcatctacttgccccttaactatttggaaattccatggctgttctgctaactcatatccgtctggcgcctttgtttcttttagcgaataatttcctggtgttaagccatctataaagatttcaccattctcatcggtcgttaaattagcttggatgacttttcctgattcatctaggaggctaaaaacagcgccgcttagtctagttccggtttcactatccgttttgattaatcgcaccgcaccagtttcagctacatctggttccagcttggcgttttcagctataacagtaacttgactcgtgtcatttgctacaatttcaaactgccatggagttgattcaagttgatatccgtctggcgcttttgtttcttgaatacgataatttcctggagcaagattattaacttcaagttctccagcttcatcggttttcaaatttgtttgtagcgtctcgccattttcagctattagcgaaaactcagctcccgccaatcgaacgccattttcgctgtcttgtttaataatttttactgaacccgcatctggaattggtgccaatttcgtattttcagctgtaattgttattttttctggttgatttggagcaatagtaaattcccacacatcagtcgctaactcatatccttctggcgcctttgtttctttaaaggaatacttacctggtgctaaattagtcactgtgatttccccgttagcatcagttgttaaattacttgcaactatagcgccatcagcggtcatcaaatcaaaaactgctccttctaaagtttcacccgttgcactatcctgtttcacgagaataacttcgccagtatcgacatctggtttccctgttttattattttcagctgttaccattgtagcactcgtttgccctgccacaatggtaaatggccatgtatttgtcgctaaatcataatttgttggagcttccgtttcttggaatgcgtagtctcctggctctaggttttgaacacgaatttctccattttcatccgagacaaggttagtttgaataacttcgccagagtcatttaataagttgaatttcgcgccggataacttagcattcgtctcgctatcaactttagttaagactgcttctcctaaatctttttcattttctgcttggatttctatcgcatctacttgccctgattccacgctgaattcccatgttttttccgagagtttatatccttctggcgcttttgtttcttttaaataataactacctaagtctaaattatggatagttagttcgccattttcatccgttgtgagtccgttttgtagttcggctccagacttatcatatagtgaaaattcagctcctgccaacgtggctccagttgctttgtcggttttcactaaatgaacctcaccagtttctttgattggcattttttcattcatgacttgaacgactttttcgtcttgctctaacttcacttggatattctctgtcgaagcggttggtaatgtgtatccttctggtgcactcacttcttttaaagtgtagtctccgtataccaaatcgtcgaactcgataacgccatttttatcggttgtttgtgtatccactttttcatcattcgcgtacaagtcaaacgtcgcgccttctagcggaatacttggatcggctttatccactttatttaaaattattttcccagtttccccggttcctgtgccgtcgcccgttgttattttaacttcaatatttttagttttttcagtttcgccttttgtaatattatctcctgtaaaagtgacggaattgccgatttgcgccgttgtttctgtatccgaggtcaaggtaatcgctgtctggtatttaatcacataggattgattaatttcatttttaaatttcacttggaaatattctaaattactttcctcatctacacctgttttcaaatcatattcacctggggaaattggcatgttactctcttgcaacatcttgcctgtaacagaagtttgcgatttgtataccttaatactagaggtgtctagtttttgccctgtaccaagtgtgtcagttacagttgcattactgaccgttgatccagattgatttgcataaatttcccaatcgatattatctccaacttgctcacccgatttattaacatatttatttgcattatcatcaattacttctgcttcgtaatcagcgagcacttcttccccgtcacttataactgctttatttttataaagcggcttagtgatgcctactggtttcgttttgtaggtaacttcaactgggtgaattaatggttttttgaaggtaataagcatttgctcgttaccattttcttttttcgtaaaagtgacatcataattttccggcggtattaattccccaacttgtggtgttgcggaaagatcaattttgtggatttcaatagagtcttgaatgaatgtttgtcctgaattaagcgaatcctctatcgttggcttggagattagtttggaactatcattgaaaattaatttccattcaatttcacctgttttgtaattgaacacaccatttttatatccgtctgcatcgatgactttatcaatccattttgtatccgagtcggatgcttctgctgtgtccgttttaatggttgcattattagtgtattcattgtctccacttgtatgagtacttggattcacttgggttttataagtaataacatgttgcccagtaatatctcggttaaaattgatttgaaatcctttttcccagctactatcgccatttaatggaacaacctcgtaatccgccgagtctaatttcacttgctcgctgtccataatttttagagtcgctggatggaaaattaatccgccgtcaggaaattcgtctgtaataaccggattatgaagcgttccgccgtctttattgataataatttcccacgttaattcccctgttttcgcattaaaattttcgatttttttatcaattagcccctctgtcggtgaaggatcggggataaaatagtcaccttctgcctcgttatcagggatgttcggggaaatgattgatgcggtgttggaaatcattcccgtggtgccttctggaacgattgtttcaaaataaatcgtgtagtaaccgtcatctggcaactcaattttaaaaccagctgaccccatatctgttacggtatattcggttggaagtagcggtattcctgtatctccatttacaatacgtgtaattccaccaaaggattgttcatcaatgtaagtatccaccattacagaattgtctagtgcgtaatgcccttggttatattctactttccacgaaattttattagatgttgtatcaaacaataatggatatttttgaataattggatctcgaggaattactacatctgaatccattacttcttccgtttcatcagaattaaatgttgctgtatttgaaaaagttgctttattaaaatccgttatttctgtttgataggtgatttgatatgctgaatcaatcggattttcaaacgttaatcgaaatcccgtttgaccagaagtattgtttattttagttacagtatattcagatggatccactttagcgcctatttcgtaagtgccatctatatgcatattcatttcgtgcacttcaaatgagtcaaagagaattttctgaccatttcccgggaaatcttctactgaagcattttcgtgcgttgctaattcttggtttattttgatttcccagtcaatcacttgcgcattttgaaccgttgacccttttttctcaaaagcgttagtggtatctggttttatttttattgtaaattcttcggagtcgttttcgctgattgggaaaacgattgtagttggtgtttcaccgtctaattcttctaaatcaaaattcgtatagacttctactatgccgtgactaatagaatgattctctacatagtcattgaaggtaatcgtcatcatcccatctgttgtaatttcgaattctccgcaagaagcccctccatcacttatgactaactccccttgaactgtcgtatagattttaaattcttttgggatttggatatgaacagtatctcccgcatgaactggttgattatccttaatcgaccaattgtaaacgacgacaatatcctcttgactatctactactctgtcagaatcgctttcactatctatcggcttgccatctctatctaaaatttgaacaccatcaatgatattatctaactctgtagcttgggcatgatgaggtacacaaaaaataatcatccctacgattaaaaaactcattaataacattggatattttttcactgtaatcatttttcattcctcgctttagattgaagtaagttcaaaattaatgtaccatgcttccgcgaggacctaactccagttttatacctttttaagcgcgcaaaaaataaaaagtatctctgtttcatgtaaacactggctatgtgcaaggcttttcacattttcgccttatagttcaaaaaaagaaccattagattagtgaaatattatctaatggttctttttcttataaaatttcttcttgcataaataaccctagcccgccgatatcatgatgttttgcgattttatctgctttttctatagctagcggaatgccattctccattgctactccaatttcggctaattcaatcataccgacatcattttcattatcaccaaaagcaatagttgaatcaagattaatgtaaccgtgttccgcaagataagtgaggcctttcgccttatcaataccttcattcataatatcaattaaattcgaggcagacgcgagaacagaaagtggcaagccttctaaagctgctttgatttcagctcgtttttctaaatccgactcaattacaagtacttttagtgggaattcaccttcccgaagcacgctgaatggatctgttgttaacgtaattggaacttgttcattttctggtaaagttttatttaattcattgaaaaaggcgattttgccagtattgcttggcccgagaattcgctccgttgtataaatatgataattaacgtccagcggttcaagcgtttctaataccgtatgtatcaaatccagttcaatattacttttatataaaatctctccagtagtaaaatcgcgtactaatcctccattacaagaaatgactggcgttttgatattaagttcgtggataaatggtaaaattgctaaatccagtcgtcccgtggcaaggaaaagttttttcccctttttttgccactccattaaaacttctttgttgagcggatgaatttgatcgcctttttttactagtaatgttccgtccatatctgtaataactgtatcaattgctacatttgccaatagttttcgcacccttctaaatttccgttattatgtacctcgattatagacgagtttcgcatgattgtcacgccgatatttggtatactaagtgggaatggaggacgataattagtgaagaaatattttattacaatcatgattttactttttggcgcgttatctctcagtgcttgccaaaaagatgatgaggttgaaaattcttctcctcctaaagtggacttaaaaaacgaaatacccattattttaattcatggaagcggtggtgatacacattccttagatgaaatggcagatcacttgatgaataaatataaaagttccaatgaagcaatgtcaatgtctattaactcaaatggaaaaattgcataccaaggcgcgctaacaaaagatgccaaacgtcccattatcaaatttggtttcgaccaaaaccaagcaactcccgatgactggtctaaatggttaaaaatcgcaatggaagatttaaagtcccgatacggtttcacacaaatggacggagttggtcattctaacggtggcttagctttaacttattttgcagaagactactctaatgacaacgcggttcctactctgcgcaaattagttgctattggctctccttttaatgatttggacccagacgacaatggcgatggtttagcttttaacaaattaccatccaacaccccgcaattagattattttattgacaaaaagactaaaattagtactgacctagaagtactatccattgctggagctctcagtgaagataatttaactgatggtattgtcccaacgaatagttcgctcgcttccagacttttcatgcctaataacgcaaaagtctatatggaagatttacaagttggtgaaagtgctattcaccaaacattgcacgaaacatctgaaagtatcgaaaaaacgcattggtttttagagaaatcgagccccgaaaaaaaagaaatcaaattaatttctaaataggaggaataatatgctacacatacaagcaaaagtccaagttaaacctgatttagtagcggaatttttggtggaagtgaatttagtaatccaaggctcgctttcagaaaccggaaatcatggctacgaattagtttgctctgtagaaaacgcaaatattttctatattctagaaaagtgggctgatgaatcagcaattcagttccataacgggacagagcattataaacttttcaaaaagaatgtccccgcttttttagcaacgccgattgaggtggatttgcttgctccagttgagcggcgatagtttatatttttaacaagaaagctttttcatcttcatattagtaccaaaaaattttgtttttttgaaactaacatcattttcgtcttagtaaagataaacttaccagtgtaagtatagtcttcttttgtgcgaattagtggctcataaactaattcctctactccaaaagattctatcgtttgcacgccgtccacattaaaagtgttcccgcttaagaaaacaagtaaaaaggattggctcgcgtacgcggaccaatccttttttaatccttcaaatagccatcttcaatccgaattacgcggtcaactaagtctaaaactcgttcatcatgcgtaaccatgatggcagctttgttttttcgttttacttcatccgcaatcatttggactactttgtgaccacggctcgcatctaagcttgcggttggttcgtccgctaaaataatatcggggtcgttcattagtgctctagcaatggcgacacgttgtttttcaccacccgataaactttccggataattgttttcgcgagcagttaaacctaattctttaagtaattcatctgctttttcttttgctactcgccctttatcaccagatagttccgcaattacgagtaactgatcacggacatttaagtacgggattaggttcgcaccttggaaaatgaaccctactttgtcgagccgcacttttgttaagtctttgcttgtaaggtcatttaacacttttccacctatagcaatttctccttctgttggggataataatgcacctgcgatggataaaaatgtacttttcccagcgcctgaaggtccaacgattgcaacgaattctccttgcgctacttctaaagatacatttttcaacacttcgatgacttgctcgccatcttgataatttttagtaatatttttcatcattaaagtcattagtttgccctcccaattgcttctaacgcatctactttcgctacacggtaaagtgataacatcgatccgatgactgctacaacaaggaataaggcagaacagccgattgcaagcaccgggctaagtgtaaatggcatgcttgctggtaaaattgctgcaagcccaaatgttaagccgtttccaattaataaactaatgactgacaagaaaacaacttgggtaacgatgcttcggcctaaataggctgttcgtgcgccaactgcttttaaaataccaaattgattgattttttgaatcgtaatgacataaaagaaagcagctagaacaaatgcggcgataacgaataaaaaggcaatcatcattagtaatgatccttgttcttctgaatagcctggaataccttgaagcacttcttcactagacgaaagttccatggatccgagtgataggttcttagctgtactttcggaaacatctagtgctacggcgttatattctccttctgctgcttggttcgtttgatgcactaatttccaagcatcccagccaacgaaaataaccggtgaatgactaaatgtattgtttttggtaaaggcagttatcgtgaattcttcccctgttgcgctatctttgagtttgctgcctaatttataaccagactcttttaaagaaatatcggctactacttcttttgttttctgtggctctgttccttctgagatggccggtttcatgaagcctgttttatctataccgaaataagtaatatctgtttttttatctttgttgggtggtgtaattgtacccatttgcacacctagattggtgctttctgattttttcacttgcttcgctacgctgtctgtttcggatgcggttaaattggacctcgttaagcgattatccgagtctttttgtaaaacataataagttgctttattggatgaaatggctgccccattatcatttgcaagtccattcgcaagccccgttacaaacaaaacaagccatgcgattaacaccataattaatccaattagaatatagcgtaattttgcgtgttttaattctcttaatgccaaaaacattccgttcaactccttctaagatcttacccttagtttaaagaagttttgtaaacggaatgtgaatcggattttacaaatttagttttttggtagtttgactgtgaatgttgttcctttttcaaggctactttgcacggttacttcgccgtgatggagcgtgataattttctggcaaatggataatcctaggccactcgagccttcttctctggttcggctttcgttagctttataaaaacggtcaaaaatcttggtcatatccaccttacttatgccgacaccgctatcttgaacttctacaaaaacattcgtcgtatcttcataaaggcggacttgaatattcccgccctgtggtgtgaatttaatcgcattagttaacaaattggaccacacttgataaagcaattcggcatcgccagtatagtttacatctgctaaatctaagtttatcgttagttctttttcgcgccaactccactcggtcatttggattaattgacgccactgcttggctaagtgaactggctctttttttcgcaactctgattcttggtcaagtgaagcgagtgtgagtagttgttttgttaaggaggatagacgcgtggtctcctctgataaaacggttaaatattccgcttgttctttttctgttaatgttcctgaacctaaaagtctcgcgaaaccttgcatggatgtgagcggagattgtagttcatgagaaacattggcgacaaattcttggcgggcagcttcagatttttcgagttcactagccattttcgtaaacgagtctgccaactgtccaatttcatccttacgccgaacttcaaatgctacatcataattacctttacggatttttttcgtcgcattcgtcaacttcacgaccggattaacaatatatctgccactaataaggacaaataggatactaatgatggatgtaaaaataagtatcatcgcgaaaaatattcggagctccccaaattgttgttccgggtcttgacgtatgaatagcgctagttgtttaccatctacttgcaccgggacaccaatggtatttcgcacatcattatcaaaaaagcctgtgatgaaaatgcctgtatcgaatgagtcaattccatgataagtatctccgtctagtacttgcttgattgtcttatctggtaaatctttttttcgaaaagcaccaccaaaataagtggatttttccgcgccatctgtcaaatataattcatatcccagttcgcccacattttccaagtactcatttaaagaaatcgtagcatttgactcgtaaaattgttggacttccttcgctattttggctgttttttcgtcgttaaaaagttttaattttatttggtaataaatgtttgcaaagaaaaagccgagcaaactactggaaaggatgacgacaagcatcgtgacaactattcgactgtataacgatttcatcttgtctcctccaatttataaccgacgccgcgcaccgtaacaattcgaataccatccttttcttcatcaaaatggtcacgcaaacgtttaatatgtacatccactgtccggtcactaccatcataatcacgttgccaaatccgctcaattaattcttctcgagtaaaaatccggccaggatagcttgctagctgatataaaagctcaaattctttcacgggaatcattcgttcttggttgccaatttttatgccgtagcttttttgatcgatagtaatgtttccgatgttgattttgacttcgcttgcttgattggaacgccgtagcaacgcacgaattcgaaagatcagctcttctggttcaaagggttttgtgacataatcatctgtgcccacttcaaaaccgcgtgatttatccgccagcgcatctttagctgtcaacataataacagggatatcaggataacttgcgcgcattttttggcaaagttcaaaaccatccatgttaggcatcatcacatcaattacagctaaatgaacttgctctgtttcaactattttttctgcttctaccccatcacttgcctcaagtacatggaagccttctgcacgcaaatagtggcccacaagtttaagtatatgccgatcatcatctactactaatatttgtttcattttcaccgctcaccttaccgtcttattttactgcatcatatcaaacttacgtgattcgttcaaatccggaatagacatttaacctatcgccccggataaagccaactgttgtaatatttaactcttcggccatattaatcgccagttcggttggggcagaacgagacaaaataattccgcaacctagttttgctgttttaacgaggatttccgaagaaatgcgcccactaaaaataattgccttatcttcagtagatgtcccgtcttgcaaggcgcgaccatatattttatctaaggcattatggcgacctatgtccatcctgctgtatattatttccgctgaactacatagtgccgcattatgcacaccaccagtttgatgaaatgtagcagaattttgttcaaacttttccattaagcgaaaaatcatgtcggttgttagttgcagattcccattttgcttcacattgacgagtgaggcatctgattggaagtagaagttttcccgggacttgccgcaacacgaggtgatgtagcgcttgccgcggtacttggcattgaatttgttcacaaaattagcgctaaccttggcgtgtccagtcgcttcgatgatatccacggaattgatgtctcgagggccccgaacgatgccttccgatgtcagaaagcccacaactaaatcttccagatattctggcgtgcagacgatggtcacgagttcttggtcgttgacgtagatagttagcggatactcggtcgcaacacttgattcaatttcttgaaaagtgcccgcttcaaaacgacggattttttggtgcgaaacaatatccatcaaaaaccactcctctctaaatcgaaacagcgataccataaagtctcgctgtttcgtctacttattttaatgtttgcccaacttcttttaaaaaggtcacaccataccggagtgcgcggttgatatcggggtctttcagcgccttcatcatcgctaacattcccatgatttcatcgtttttcgcgctttcctctgcttttttcgcagcatttttcaaattggctatcatttcctcagtttgctctggttttgtatcggttaatagcttgctcgaaatcatcatgttattaatcgcattcgtcatcggttccttacgccattcattcagaaaagttttcgtaatatctccgcgcgctttaatcgcactattcaaagcttcaagtgcccccgactcctgcagtaactttaccgtttctaagatttcgataaaaccagaatcttgttcagcaatatccgctttcatttgttctaaacgttctttttccaattcttccggggtcttttttgtatcacgaatcgttgaaattggttctgccatcagtgattcctccctttcccgccgcatccacagttaccaccacaggcgcagttcactttagaaatcggttgataatcttctctcgaccatttgcgcgctacttcagccccattttgcgggaatcttttacgattacgcggattgtggtcaggaagtggatttttcccagttttttcaagcacagttagatttacttttgtttgtttataggccggtgttttcgtccgaacatctcccgcacttgaagtcagcaaattgactgcagtttcgctactcacagaatgcattggcacataaacttcatttcctttcatcctatcagtcaccacagcacgaagcttaatgcgaccatacggtgaacttagacgaacgagcgaaccactttccaaatcgcgttctttcgctaactcatgcgatacttctacaaacacttccggtaatttataatccagccctttcgacttatctgtcaaattcccctcatggaactgctccagcaaacgcccattattcagtgttaaattatattcttccgggaaagtaatcggtgcaatatacggtaacgtcgaaaattgcgctttgccgtccggaaaattaaatcgttcttcataaagtaacggcatatcctttccatccgcgctcactggccacacaaggctgttaaatccttgcatccggtcataacgaacccctgcaaaaaatggtgccaagctagcaatttcatccataatctcgctcggatgatcataattccagtccgttcttccgcatgctctagccacctcttgaataatccaccagtctggctttgaatctccaagcggctctaacacctcataaagtcgttgtacacggcgctctgtattggtgaatgttccttctttttcaagtgaaggcgctgccgggaaaacaacatcagcaaactgcgccgtttttgataaaaatacatcttgaacaacaaagaaatcaaggctcgcaaggatttcttgcacatggttcgagttagaatccacccaagccatttcctcaccaatcacatacatagaatggagcgttcccgcctcaatcgcatcaagcatttcattattttttaggcctggttctgatgaaattgataccccataagcttcttcaaaacgagcacgaacttcatcatttcctagtggttgaattcctgggagaacgttaggtagtgaccccatatcgcaagcaccttgtacattattatgccctctaagcggataagcgcctgcaccgtgtcttccgaagttcccagtgacaagaagcaagttagcgattgcagacgatgtatgagatccagcaatattttgcgtaactcccattccccaacaaaccgctgtcccgtctgcttcatgaaccatctgcgccacttttttcaacgtctctactgataatcctgtttctttttccgcatattccaatgtaaatggttctaaaaatgctagataatctgccacattactaatacgattctccataaagacttcatcatgccatccctgatcaatcatatatttcgcaaccgccgtcaaccaaacaaaatcggttccttgttttggatgaatgaataaatcagaacgctctgccatttcgtgttttcgcaaatctgagacaattagcttttgaccgcgtgtcttctgagctcgcttgattctactagcaaggactggatgcccatcggctggtgatgcaccaacaataataacaagccccgcagattcgatatcttccacagtccctgaatctgcaccaataccaaccgtccgagtcagtccatccgaagccggcgcctgacaataacgtgaacaattatcaatattattcgtttcaaaaacctgccgcgccaatttttgcatcaaatagttctcttcattcgtcgtcttagatgaactaataaatccaagtgagtcattgccgtatttagcctgaatttctcgcagtttggtcgcaactaaatgaatcgcatcttcccagctcgccggcacaaactcattaccttcgcgaatgagcggcgtcgtaatccgtttctcgctattgacaaaatcccaaccaaatttcccttttacacatgtggcaaatttgttcacaggaccttccccggttggctcgactttcaaaattttacgatccttcgtccacacctcaaacgtacaaccaaccccgcaaaaagtacaaactgtcttcgttttcttcgtccgtgtttcccgcattgacgcttccatttccgacacagcaaaaaccgtttgataattcggctccacttttttcaccatatcaatcattggttctagcatatcttcatctaaaccagtcataaagccggcttgaccaagcatggatttttccatcagcgcattacaaggacacaccgtcgcacacagcccacaagaaacacatgacgataaattcgccggacgatcatcatcccaaataacccgcggctgactacgttcccaatcaatcgaaagcgtctcattcacctgtacttgctgacacgcctccacacaacgtccacaaagaatacattgatccggatcataacgataaaacggatgcgaaaaatcattcaaatatcccttttcgcggtaaggacgttcttgtttttccacaccaagaagttctgtcgtattatgtactttgcagttaccattgttattatcacaaaccgtacaatacaataaatgattttccaaaatccggtccattgcctctaattgtgcgtctttcgctagttctgagtttgttttaatttccatcccgtctgttagattcgtgctgcacgcccgcataagctccccatcaacctcgcacatacacgtatcacaagattgaattggcccaatttgctcactataacaaatatgcggatgctgtattccttctgcatttaaatagtccagcattcgcgttccttccaccacatcccgcgccacgccattaatttgcaccgatacttttgcgcccatcacattacctcctatatagagaaagcgtttccatttttcgcttatattataacagttcttacttaaaaatcacagtaatacggcaattgataatcgttctcaaacattgctactatgcgatttccctcacaaggctaacgaattcattgacacttatgcaacttttctgtattctttattacaaagctacgacgagaaaagtacgacgcccgttttttccaaaagagagttcccactgctgaaaaggaacaaaaaacaacgtccgaaaatggcctctgagttttgccgctgaaatgaagtaagctgcaacggatttggcgtccgttatcaaacgccctaagtatttctacataaatgcttatttgaggttttcagtataaactgaaaataaattaaggtggtaccgcgtgaaattttctcgcccttattccaagatatttttttggaaaagggcgagttttattttaccctaaattgctcgaaatggaggatttcaaaatgacaaaacaactacttgttttacaatctgattttggtattagtgatggtgcagttagcgccatgtacggcgtgattaatagcgttagcatagatttgcaaatatatgatttaacacatcaaattcctcaatttaatatttgggaagcatcctatcgtttactccaaaccgtgacttattggcccgaagataccatttttgtttcgattgttgatcctggagttggttcgaagcgtcgaagcgtcgccgttttaacagaagatggtcattatattattacgccagacaatggaaccctaactcatatcgcgcattacggaacaattaaagcagttcgtctcattgatgaagaaaaaaatcgtcttccaaagtcaggtgcatcccatacatttcacggtcgagatattttcgcttataccgcagctaggctcgcagccggtgtaattaattttgaagatattggcccagcagccaaccccgactccattgtctcccttagtttaagcgactcttatttggaaggagatcaagctttcggaaccattgatattatcgatcgcccatttggtaacctttggacaaatattcgtcggaccgatttttttgagctgggcgcaaactatggcgattccattgaagtcctcataaaacaccacgaccgtatagtttataagaatttcgttacttatagccgctcatttgcagacttacggatcggcgaagcactcatctacgtcaactcactcgataacctcggactcggtatcaatcaaggttctttcgtagacgcttattcagtcggcaccggcaccagctggaaagtcacccttaaaaaagtataaaaaacaaggtcaaacttccaaattggaagtttgaccctgtttcttttttatttcgtatattctttgacgattggctcttgtttcttggtttttaggaataaacttaagatcatcccaatagccgcaaaaatcgctgcaaccataaacgcagcacgcattccgtccaaactagcatcttgcgctttttgagcaaagctagctggatcagtcgccataagcgctttacctggcatattgtctttggttacattcgttaaaacagtaataagtaccgcagtcccgattgaaccagcaatttgtcgaatcgtattatttactgccgaaccatgattaatcaagtggttaggaagtgcattcatacctgcagtcgaaactggcatcattgccattgaaatcccgaagaacctcacagcataaaatacaacaatataccaaagcggcgtatccatcgttaagaacataaatggaattgtaccgatagtcaaaatggtaaccccagtaatcgtcagccattttgccccaattttatcgaaaataatgcccgtaattggactcattatccccataataatcgcacccggaagtaataatagacctgattgaagcgccgactccccgcgaattgtttgaatataaagaggcaacacaatttccgcaccaatcattgccattgttacaattgaaccaagaataacagacaatgaaaataccggatatttaaacacatgtagttcaagcatcggattatcaataactagttggcgccaaacaaatagtgcaataacaacgacaccaacaatcaacatcgtaataaccgttgtatctccccaaccatcattacccgctgaactaaatccgtatagcaatgccccaaaaccaatcgaagacattacaatagaaagaaaatcaatttttgtatcagttaacttcactacttttttcattccaaagaacgctagaattatatcgataaccgcgattggaattaaaataagaaataatacgcgccaatcatacgaatccacaatccaaccagacaaagttggcccaattgctggagcaaacgcaataacgagtcccatcagccccattgccgccccacgtttttcacgcgggaaaattagcaagaagattgtttgaagtaatggcatcataatccccgcacccgccgcttgaacaatacgaccagtaagcaagatcgggaatgaacccgccacagatgcaataattgtaccaattgtaaatacagtcatcgccgtaataaataacgttttcgaactaattttttcaattaaaagtgctgtaatcggaatcataatcccatttgtcagcaagaaagccgtcgtcaaccattgccccgtcgctgctgtaatatgcaaatcatccataatcattggtagcgccgtcgctaataacgtctgattcaaaatcgctacaaatgccccaataatcattgttactactaataaacttctactataagatttcccgttaacatcaacgggccgttctactgctgtactattcaaaattaataccccttcccatgtggaaatttccagatgaataatagaagtataataaaaaaagaccaacaagtcaaataaaagtgactggtcagtctaattattataaaagcccgttcacacaagcctctaatttatttacttctttcgtcaaactagccggtacatgttgcttaagatagagtagcgttccttgaaccatgaaatctcttggcgcctcattattattaatctcaccaacaagtgcattcatcgattccttatactgccatttatccgaatcagcaatatcagcattctcaattccaacattaagctcctcaagcgcttcccggagtttagccaaacgcttcttccgtatcatcgtttggtctggcacaaggttttccgtatccgcttccgtaaatacaatctctccactctccaaaatatccttaacaagcgcatcaagtcttctcacaacataaggaatcgcccgctcaatcagccctgtgttaacattcttgctaccactagcaaagacatacatcgctgccataccactaagtagcatcgtaatatcattaatatacggcttcgtttcctccccgtaaacctctaacaactgatatttaacccattccatatttttcagccgaacattctgtaaaaacgcattaaaatcatcatcaatcatcgtctgagaaaaagtaatattcaatatctccccattctccgtataaaaatgaataataatcttcaaacactccgtaaaattatccttcttcgctccatcctgcgccatcgtatactccaagcgctgatgcaaaactgaatattcctgcttaaaaatcacaattgccagttcctctttcgaagtaaaataattataaaaagtccctttagaaatcccagctgcatcaaccatatcttgtacagacgtcttcaaatacccttgtttttgaaacacctctttagccgacttaataatccgctgcttcttctccttcaaaaaaacaccccacccgttctgttattatacccatagtataatcgatttatactacctattcaagatatccataataaaaatcattattcttttaaacaataaaaaaagcctcgcatactagcgaaacatacaaattatccatatattatttaagccacttgtcggatttgaaccgacgaccccttccttaccatggaagtgctctaccaactgagctaaagcggcagcaaagcctttcaaataaaaaaatggctccacaggcaggactcgaacctgcgaccgatcggttaacagccgattgctctaccaactgagctactgtggaataataaattgcccggcagcgacctactctcgcagggggaagcccccaactaccattggcgcagagaagcttaactaccgtgttcgggatgggaacgggtgtgaccttctcgccataactaccagacaatattgagttgttgaaagattgctctctcaaaactagagaagaaagtgttcagttaggtaacttcgtttcattttttggttaagtcctcgatcgattagtatttgtccgctccatgtatcgctacacttccactccaaacctatctacctgatcatctttcagggatcttactttccgaagaaatgggaaatctcatcttgaggggggcttcacgcttagatgctttcagcgtttatccctgccacacatagctacccagcgatgctcctggcggaacaactggtacaccagcggtgtgtccatcccggtcctctcgtactaaggacagctcctctcaaatttcctgcgcccgcgacggatagggaccgaactgtctcacgacgttctgaacccagctcgcgtgccgctttaatgggcgaacagcccaacccttgggaccgactacagccccaggatgcgacgagccgacatcgaggtgccaaacctccccgtcgatgtggactcttgggggagataagcctgttatccccggggtagcttttatccgttgagcgatggcccttccatgcggaaccaccggatcactaagcccgactttcgtccctgctcgacttgtcagtctcgcagtcaagctcccttgtgcctttacactctgcgaatgatttccatccattctgagggaacctttgggcgcctccgttactctttaggaggcgaccgccccagtcaaactgcccacctgacactgtctccccacgcgctaagcgtggcgggttagaatggtcatacagccagggtagtatcccaccattgcctcctcgtatgctagcgcacacgtctcttcggctcctacctatcctgtacaagcggtacaaacattccatatcaggttgcagtaaagctccacggggtctttccgtcctgtcgcgggtaacctgcatcttcacaggtactataatttcaccgagtctctcgttgagacagtgcccagatcgttgcgcctttcgtgcgggtcggaacttacccgacaaggaatttcgctaccttaggaccgttatagttacggccgccgtttactggggcttcaattcgtaccttcgccgaagctaagcactcctcttaaccttccagcaccgggcaggcgtcagcccctatacgtcaccttacggttttgcagagacctgtgtttttgctaaacagtcgcctgggcctattcactgcggctctctcgggcttgcaccctaatagagcaccccttctcccgaagttacggggtcattttgccgagttccttaacgagagttctctcgctcaccttaggattctctcctcatctacctgtgtcggtttgcggtacgggcagtactactcttcctagaggcttttcttgacagcgtgaaatcaggaacttccgtacttaatttccttccccatcacagctcatgcttcgcgagaagcggatttgcctacttctcacactcactgcttggacgcacatttccattcgtgcgattccctatccttctgtgtcaccccatcggttaaacaattagcactggtacaggaatctctacctgttgtccatcgcctacgcctatcggcctcggcttaggtcccgactaaccctgagcggacgagccttcctcaggaaaccttagatattcggtggaagggattctcacccttctttcgctactcataccggcattctcacttctaagcgctccaccagtccttccggtctgacttcaccgcccttagaacgctctcctaccacgaacctctaaagaggttcatccacagtttcggtaatatgtttagccccggtacattttcggcgcggggtcactcgaccagtgagctattacgcactctttcaatggtggctgcttctaagccaacatcctggttgtctaagcaaccccacatccttttccacttaacatatatttggggaccttaactggtggtctgggctgtttccctttcgactacggatcttatcactcgcagtctgactcccgagtataagtacatggcattcggagtttatctgaattcggtaacccgagaagggcccctagtccaaacagtgctctacctccatgactctttacctcgaggctagccctaaagctatttcggagagaaccagctatctccaagttcgattggaatttctccgctacccacacctcatccccgcacttttcaacgtgcgtgggttcggacctccagtaagtattaccttaccttcatcctggacatgggtagatcacctggtttcgggtctacgacctgttacttatgcgccctattcagactcgctttcgctacggctccgctttttccgcttaaccttgcaacaaatcgtaactcgccggttcattctacaaaaggcacgctatcacccattaacgggctctaactacttgtaggcacacggtttcaggaactgtttcactccccttccggggtgcttttcacctttccctcacggtactggttcactatcggtcactagggagtatttagccttgggagatggtcctcccggattccgacggaatttcacgtgttccgccgtactcaggatccactctggagggaaagctatttcaactaccgggctgttaccgtctttggcgggcctttccagaccgcttcatttataactttcttttgtaactccgtatagagtgtcctacaaccccaagaagcaagcttcttggtttgggctctttccgtttcgctcgccgctactcaggaaatcgatttttctttctcttcctccaggtacttagatgtttcagttccctgggtctgccttcctcacgctatgtattcacgtaaggatactatccgactaaagatagtgggttcccccattcggaaatctctggatcaacgcttacgtacagctccccaaagcatatcggtgttagtcccgtccttcttcggctcctagtgccaaggcatccaccgtgcgccctttctaacttaaccaatttacttctacgaagtaaaggttgtttttctgattttccgtatcagcgatgatacatccaatcagatgaaagattcactttcagatgattctcggttacttgtgtcataaataataaattatctatgctaactttactaactttcttatctagttttcaaagaacaattttggtggagcctagcgggatcgaaccgctgacctcctgcgtgcaaagcaggcgctctcccagctgagctaaggccccataaaaggatatgattatttgtatttcttgcgtcagaaagaaaaagtgggcctaaatggactcgaaccatcgacctcacgcttatcaggcgtgcgctctaaccagctgagctataggcccgtcaaaaatgtagtggcgcgatgcttcaagcatagtgccttgcatactttatctgacataaaagagagtaacctctcaaaactgaacaaatagagaagaacgaaaactcacaggtttccttttccttagaaaggaggtgatccagccgcaccttccgatacggctaccttgttacgacttcaccccaattatctgtcccaccttcggcggctggctccataaaggttaccctaccgacttcgggtgttacaaactctcgtggtgtgacgggcggtgtgtacaaggcccgggaacgtattcaccgtggcatgctgatccacgattactagcgattccggcttcatgtaggcgagttgcagcctacaatccgaactgagaatagttttatgggattagctccacctcgcggcttcgcgaccctttgtactatccattgtagcacgtgtgtagcccaggtcataaggggcatgatgatttgacgtcatccccaccttcctccggcttgcaccggcagtcactttagagtgcccaactaaatgctggcaactaaaatcaagggttgcgctcgttgcgggacttaacccaacatctcacgacacgagctgacgacaaccatgcaccacctgtcactttgtccccgaagggaaagctctgtctccagagtggtcaaaggatgtcaagacctggtaaggttcttcgcgttgcttcgaattaaaccacatgctccaccgcttgtgcgggcccccgtcaattcctttgagtttcaaccttgcggtcgtactccccaggcggagtgcttaatgcgttagctgcagcactaaggggcggaaaccccctaacacttagcactcatcgtttacggcgtggactaccagggtatctaatcctgtttgctccccacgctttcgcgcctcagcgtcagttacagaccagagagtcgccttcgccactggtgttcctccacatatctacgcatttcaccgctacacgtggaattccactctcctcttctgcactccagtcttccagtttccaatgaccctccccggttaagccgggggctttcacatcagacttaaaagaccgcctgcgcgcgctttacgcccaataaatccggacaacgcttgccacctacgtattaccgcggctgctggcacgtagttagccgtggctttctggttagataccgtcaagggacaagcagttactcttatccttgttcttctctaacaacagtactttacgatccgaaaaccttcttcatacacgcggcgttgctccgtcagactttcgtccattgcggaagattccctactgctgcctcccgtaggagtctgggccgtgtctcagtcccagtgtggccgatcaccctctcaggtcggctatgcatcgttgccttggtaggccattaccctaccaactagctaatgcaccgcgggcccatctgtaagcgatagccgaaaccatctttcaaaagcgtggcatgcgccacactttatcattcggtattagccccggtttcccggagttatccccaacttacaggcaggttgcccacgtgttactcacccgtccgccactaactttggaagagcaagctcttcctccgttcgttcgacttgcatgtattaggcacgccgccagcgttcgtcctgagccaggatcaaactctctttaaaatataaattgaatttgaatacttattcaacaccgtgaataagattccttgcgtcaaattgacttcgctagcaattaaattactagtttgttttgttgaaaacagctttctgttttctgccctgcgattaccagtgagactttacgtctcattgcttttcgtcttcttctttgttcagttttcaaaggtcaatttcttttgttgcgaaagcgttttgtccgcatcagcaacgtttataaatataccaagatttttgcctttcgtcaatactttttacaaagtttttatgataaatatggaattattttctctgctagggttttatatgcttttcctgaagtgcttgaagagttgaaaagggctgatacatagccatttccatttggttctggttgttctattggcagttgtattaaaagttgtgtttctaagtctgcagcaactttttcgccgccgccttgtccgaatacttttaatacttgtccatcagctaaagtaagataagacatattttcgattacaccgatgattttgtgattgttttttgctgccatatatcctgctcgagatgcgactgacgcggctgcataatgtggtgttgtaacaataagttcattgcatttcgggataagcgtatggatatctagcgcaacatctccagttccaggtggtaaatcgataagtaaatagtctagttttccccatcttacttcttctaaaaacattttaatcattttccctagcattggtccgcgccagataactggttctccttgttccacaaaaaaatccatagaaatcatttgaatgccgtgtgtttcgactgggatgatttggccattttctttgtggggggattcggttgttcctagcagtacaggaatactgaatccatatatatccgcgtctaataatcctacttttttgccttgttgtgctaaggcgattgcaagattcgcagatacagttgatttcccgacgccacctttaccactcgctattgctaagaatttcgtttcactagcttctgagagtatgttatctcttgcttggaaaatgcggtcgataactgctgcgggtaggtattctagctcaatatttatttcatttacgccgaattgggtgagaagttcttctatattatgaacaaaatgatccgtttctactgctggatcagctaatgcgattttgatgtttgctgtttcttcaagcacttgcacttctaaaacaccttctgtttcttctaagcttgcctctaaaacaggatcttgcaatctatatagcaatctagtaatttgttgttcgtttaacatatataaaaacctccaaaaatgaatgcgctgacatactgattattatagcatgaccgttttattatttcacatattgcttgtcttttcggtacaaaagtttgttgaagaaaatttcacaaattttacatatttaacatttccagctttagtccttacgtcccaataggtttggtgtagttattgtttttcgtcatagaaatgtaatagaaattttttggcattttttgataatatagttgcagatatataaaaaggagtgcattgaaatttggatagaaagtttataaaaccagggataattctgctaattgtggcatttttggtagtttccataaatgttggagcagaaacaggaggtagcagaacagctcaagttaatctgactacttcgcaacaagctttcattgatgaaattttaccagcggctcaggatggatatcgcgatggtaaattgcttacaagtgtaacactcgctcaagcaattttagaatcaaattggggtgaaagtggtctaagccagaactctaaaaacttatttggaattaaaggtacttataaaggtaagtctgtctccatggggacaatggaagcatccggctcaaccaccgctaatttccgcgtttaccctagttggaaagaatccattgaagatcacacagctttaattactgaaaatgcgcgctatcaagacgctgttgatgaaacggactaccgcaaagcactgcaagctattaaagatggtggttatgcgactgatccagattatgtttctaaactagtagcaattattgaacgttacaacttagataaatacgatgtcatttacgataaaatcgagtctaatcaatccttagcagcaattggaacagtagctgaaaataaaaaacaagaggttatttggtcggcaccgtacaatacagaaaatgctaataaaatcgggaccctcgaaaattactcagggcgtaacttagaaatttcctgggaagctaaaacagaaaaaggtctatggtactttattcgcgagaacaacaaagatattggttggataaatagtaatgccttaaaaatcagctatcatcaaaaagaagatgaaaatgttcatttaaccaaatatgtagatgatttaagcgcacatgtatatcgtctaccaagccctgaaaaacaattcgataatggaactatcgcaaaatacgatagaaaagcccttcaagtagataaaaaaattactcgtggcggctatgcttggttccgcatttcagaaggcgagaaagtaattggctgggttcgcgcagataaattgaatgatcgcctttacgatcgcatcacagaacaaacttcgtacgatggctatgctctagtaagtaaatctgcaactgataacgtatggactgcaccattcaacacaaaaaacgcagaaaaattagcaccacttgcagattataataatgaaaaactagaaatagtgactcgcgctaaagccggaaatacactttggtatcagtttaaagtagatggaaaacttgttggatgggctagcgaaaaagacttaaatgtattttatactaccgctaaagaagaaccagtaaaacaagttgcttacgtgaaagaccctacagcaaagctttataacaaacctgtagaatcaacaagtactaatccaaaagcagttggcttttattatggaaaattattagcagtggataaaacagccacaattcttggtgaagattggttgcatcttaaagacagtcaaaattcactaggatggattaaagctatcgacatcaatagttaaataaaaaaaggttctgcatttacgcagaacctttttttcgcttatacattcagtttgcgactagccatccatttcaccatttctggatccgcatgtgagaagaactggctttccccttgatctaggccggcaatttcttccttatctgcttccgttaattcaaaatcaaatatagccaaattttgcgccattctttctggttttacagatttagctaagacgataatatcttgctctactagccaacgcaaaattacttgagcggccgattttccatatttcgcaccaatctttgttaaaactgggttattaaagatatcatttttcccttccgcaaatggtgcccatgcttctattgcaacgccttcttttcgtaaaatagctagattcgctgtctgttgttggaaaggattaacttcaatttggttgacttgcggtgttacttcattgaacgcagctaggtcaattacgcgatctgggctaaaattggatacgccaattgctctaatttttccagacgcctgtaattcctccatcgctatccatgccccgtagacatcattgaaaggttgatgaattagcagtaaatcaacataatccaaccctaaacgctttaacgaccggtcaaatgagctcataacacctttataactcacattttccacccatatttttgtcgtgatgaatagttctttgcgatcgacgccggatgccgcaatcccgcgacctacagcttcttcattcatataactttgcgcagtatcaatgtgacgatagcctgctttaatcgcatcttttaccgcgtgttccgcttcagcagcatctgtaatttgatatgtcccaaatcctaaaataggtacttctacaccattgtttaatttcactgttttcatttgaaaatcctcctcttatctttaaaatttgtcccgttcccataatttttctacattatctgcatttaattcgccagctttaaactgcgcaatgtgactatcgtacgaatcgattttgtacacgagcaaatctctaacctgcttcatttcggctaatttttcgtctaattcttttagttgatcaaccaatacttgtttttgcgccgcttcgacattttgcgtctctctgagttgcgcaagtgttgcaaactcaattaacgattctaccgataatcccgcattccgtaaattcttcacgagataaacccagttcaagtcactcgttttatagtcccgataaccactttcgttacgatggactggtggaataacaccaacccgctcataataacgcaacgtatctactgttaaaccaaacatatcagccgcttgtttgatattcatcctccatcacctcgtttcgttctttacatatagaattataaaccctggagttcacaccaaggcaaggaatttgagtttatttttttgagaaaagaaaaaactctctgcgggcgagagaattttatttgtttagcaggatgattttttgtacgtattttgggtctatttgggctggtgaagtttcttggattgggaaatcttttgttaaaatgatttttacgtcatcgtttttgtttaagtcggttatttttattttatttcccgtttcgtcgtaatatttatctacgatgtcaaagcgtattgcggcttccggattatacttatcctttttttctttgaaattattaattagaattgcatccgtttcaacttgttctattgtgccggttgcttcggtggcttgtgtttggttttcggaggttgagcatgctgttacaaagagtaatgtgcaaaaaataaaaatgattgaggtttttttcatggtggggggctcctttttatctctcttgttttaatccagtaaatattgacacttaaatcatagcataaaatgtactgaataactaaagtcataccgaaatttccaaactgattaatcattaaatagaaaactaactgatttaataaatgatcatatacggcacattttaaaaaaaacaaggttaatcatgttataatagccattctgtatatttatatctaaacacaaaaggagccggaaaagatgaaaaaaagaggtttattgttggtaagtgttttaatgcttttcatttttttgacagtagcatgcgggagttctgaagacaatgaagaaagtggagaaataagtacgaaagaaattgaacttaccgttgacgaccctattataccaaccgatgaaaacggtgaagcaactatagagggaactgtagatcctaaatccaaattaaccattgatggtaaagccgtaaaaaaagatgacagcgggagatttacttatacttacagtttaactaacgataatgttgcagaagttgatgtcaaacttctagcggtcagaaaaaattacaaagatgaaaagtacactataactattactaacaattcaaaagcatataacgacaacatggttaaacaagaggcaatacaaaaagaggaagccgagaaagctgaaaaggaacgtaaagaagcggaggaaaaagcaaaacaagaagaagaagctgccgctgcaaaagctgcaacgactgatgaaaacactccttctgatgataccgtatatggtactttagccagtaaagatactttaacaaaagagggagatgcattttataaagatgaagcacttgatgtactctattctacagtagaaaacgatgaaatttttcaagtacttatacaattaggcgacgaaagtacgattcgaaaagatttagataaaaatcatttaacagaattagcacgagattatatggaatctgatgccactcttatacaaactgtctccgatgaatcttttgtttatgaatctccatctataaataaaacatatacagtagattatatgttaaacgatgaaggttatgttattgcggtttatgttacacaagcaaagtgactaaaaaaaacaaaacctttaagctatacaacttttaattaaaagtatactattacaaaaaagcccttaagaacttttttgtttgataaatagaatagcgactcaatgaaacttgcttttcattgagtcgttttctatatagctccactaaacaaaaaaagcaccagcaaaagctgatgctttgaaacgacatattaacgttttgagaactgaggtgcacgacgcgcgcctttaagtcctggttttttacgttctttcatacgtgaatcacgagtaagtaggccagcagatttaagtgctgggcggtactcaggagccacttgtaatagtgcacgagctacaccatgacggatagcaccggcttgaccagtgtaaccaccaccgtgaacgtttactagtacatcatagttacctaaagtttctgtagctactaaaggttgtttgataacttcacgaagagctgcaaatgggatgtaatcttcccagtctctattgttaataacgattttgccgtcgcctggtactaaacgtacgcgagctacagagcttttacgacgaccagttccgtaatattgtacttgagccacttagtattcctcctttattaattaaccgcgtaattcgtatacttctggttgttgagctgcgtgttcgtgctcagatccaccatatacgtgtaattttttgaataattgacgcccaagagaattttttggaagcatacctttgatagatagttctaataatttctcaggattgtttgtacgcatttcgcctgcagtacgagatttcaaaccgcctggatattgagagtgacggtagtaaattttgtcagtagcttttttaccagtaagaccaatcttaccagcgttgatgatgattacaaagtctccagtgtcgatatgtggagtaaattgtggtttgttttttccgcgaagaattgaagcaacttcactggataaacgtcctaaagaaacaccagtagcgtcgataacgtaccatttacgttctacttcgccgggtttcgccatataagttgtacgcatgaattaccctcctaaataaattgaaacaaattagctcccgaaaactgttcctaattcccgaaatgctattctatatttttattgtttaaacacaacaaccttccggggcttattgtggggcaaacaataccatagtccataatacagtttttggagcaaaaagtcaatgcgttctgcaaaaaaacatccaatttttattcatagtccactcgccataaatataacccttgtggcggcgcagttttactaattaatttttgcctatcacgtgctaataaagcctcactaatatcatccggagaaattcgaccttgccctgcatcgagcaaagttcccgtcaaaattcggaccatattatacaaaaagccattcccttgaaaagcaatcactaacgtctcatcgtcctcttcataaaaatcaatactataaagcgtccggactttagaatcccgctccgttctcgccgaacagaagctagtaaaatcatgctcgccaatcaggcgtttactcgccaatttcatttttgaaatatccagttcatacggataatgtagcgcaaaattccgactaaaaggatcaaaaattttcgtccgttttaccacataacgatattcttttccgaccgtgccaaatctagcatggaaatcgtctggtacttcttccactgttaaaaagctaatatcaaacggggtcatgacttgtaaagctttttggaatttttcggcagtgatatccagttccgaatcgaaatgaataacctgacctttcgcatgaacaccagtatctgttcttcccgatgctgtaacccgcacagtcttacctttatgcatttttgtcagtgctttttcaatttccgcttggaccgtacgtgtattcggctgcacctgatagccataaaacccactaccatcataagaaattatcgctttatatcttgtcattcatttcaactccgcaaccaaaataataatccacttaataccgctaaagaaattaacaaaaatgtatctgcaaatcgccagcgtagtaaacggaatcttgttctccctttaccacctcgataaccgcgagcttccatcgcaatcgccaagtcttccgcacgcttaaacgcactaataaaaagaggcacgagcagcggaataatcgctttaatccgatcactccattttccactcgtaaattcaaccccacgagctttttgcgcttttaaaattttctccgtttcatccatcaatgttggaataaatcgcaaagaaatactcagcatcaaagcaagttcatgtactggtaaatgcactaaacgaaacggcgctaaaattttctccagtccgtctgttagttcaatcgggcttgtcgttaatgttaaaagtgttgtcataaaaataataagcacaaaacggcaaaacatcatcgctccatttgccagtccgagtgttgttatttgtaaaagtcctaaatcaactaaaactgtcccgcctttcgtaaaaaagacttgcagtaatagcgtaattaaaataagccagaaaattggttgtaaacctttaataaaaaataaaaatggcactttcgaagttaggactaaatacaatacataaacaaacattagtgcatacgtcagccaattattagccaaaaagacaatcgcaataaacgccataacagcagtgattttcgcgcgtgggtcaattcgatgcaaccaagagttccccggaatataacgtccgagaatcattttatccatcataattatgccccgcccttcgctaaataaggcgccatttcggttgttaattcatcaatggttaaacaagtttttgttaatttcacatcaaatttgcgctcaaaaagtccttggaatctcaccacatccggtacagataacccaagatcaaccagttcgtctggcttcgcgaaaatttcacgtggcgtaccgatttgtagaaccgtccccgccttcatcaagacaatcttttccgcataacgagcagcatcttccatactatgtgttacaaggaccgtcgtgagccctttttctttatgaagattgtagaacatttccatgatttcctcgcgaccatgaggatctagtcccgctgttggctcatctagcacaagcacttctggatccatcgccaaaacacctgcaattgcaacccggcgcatttgcccaccagaaagttcaaacggcgaacgtgacaaaatttcctcggtcagtcctacttcataaattacttttttggcgcgcagtttcgcatcttcctcggaaacgccaaagttcatcggtccaaaacaaatatccttttcaaccgtttcttcaaaaagttgtgcttctggaaattggaacacaatcccgacttttttacgtaaatcgcgtagtttcttttgcttcacgccggcaacgatttctcgatcaccaactgtaattttcccttctgtaggcattaaaagggcattcaagtgttgtagcaaagttgatttcccagagccagtatgaccaataattgcagaatagctaccagaatcaaaagaaacattcacatcaagtaatgctcgcttttcaaaagggctatttttttgataacaataacctagttgttcgagtttaatttccataattgatctagtaatgctccttccgatagcacggtgcttccagtttcaaagccgcctgcaactaatttttcttgtaattcaataataaatggaacccctaggccaatttctcgcattgcatctgcttgctggaaaatttctttcggcgtaccttcactatgaatctcacctttattcatcacgattacccgatctgcaaaaaggacttcatccaaatcatgcgtaatcgaaatcaccgtaatatcttcctgttcgcgcataattcgaatagtttccattacttcagcgcgtcctcttggatcaagcatcgaagtcgcctcatccaaaataatcacatccggctgcagcgccaaaacgcccgcaattgcgacacgttgcttttgcccaccagaaagtctcgccggttcatgtagcgcgtagctttgcataccaacttcattcaaagccgattccacacgttcgaccatcgtatcatgtggaacaccgtgattttcaagcccaaatgccacatcatcttgcacagtagccccgacaaattggttatccggattttggaaaaccatgcctacttgtcgtctaatttcccatatatttttttcagacaaaacaaaatgcccgattttaattaagccatcttccggaaaaagtaagccgtttagcaattttgcaatagttgattttcctgaaccattatgaccaacaagtgcaacccattcccctttttgagcagaaatagatacatctttcactgcatatttttccgtatcctcatatttataaaaaacgtgctctaatctcacaaaactttctgccacgcttaacacctcactttttgaccattcattgtttattatagtataaacatccatccggcgcaaaatttcctttttgattgttttggtttaatgccaaagggaatatattaacgttaaggatgtgataactatgttagcagattttattttacggcttgttgttgcgggtctccttggagcaattattggacttgaccgagaaatcagggcgaaggaagctggattccggacacatttcttggtttctttaggtagtgctttgattatgatcgtctctcagtacggtttttctcaaatcgccaccatgcaaaatgtatcgttcgacccaagtcgtgtcgctgcccaagtggtaagcggtattggctttattggcgctggtacgattattatccaaaagaaattcgttcgcggtctaacaacagctgccggactttgggctacagctggtatcggacttgccattggcgccgggatgtactgggttggtatcgccgctactttactgacattaattggtttagagtttctcagcattatttttaaatcgttcgcctttcatacaactgcgattatttattcaaccgacaaacaggaaaacctcgtcaaagttaccgatcaaattaaacaaaacaaacagcaaatcgtttcctactccagcgaaaaagaactcattggcgaaagtctttttattcgtgtaaatattgttgtaaaaacaaagaataagaacgatgaatatgaactatttcactttatccaaacacttcctaatgtaacggtggaaaaaatggagtaaacagagcttttccaatgattttcacacgtttttgttcacagaatatccatttacttccggcttccccttttgctataattcacccgtcagcataaacagaatagggagaagggatgaaatgaaaaactttgtaacctcagaacgttcgatttttgagatggaaaaatcaacggaacctgcgattagagtgaaagatggctctgtggtaaaaataaaaacaaaagaccacttcaatggccaaattcacgccaaacagcttcattacggggaactagattggaaacaattttcaccaactaccggaccaatctatattgaagaagcaagaccgggggatttattagctataacgattgaaaaaattgaactcctagggacggaggtctttttgctaaacgggccgaacatcgggataacagatgatttattaacaagcaactccactcgatgctacaaagtcgaaaacaaccagattatctattcagaagatattcatattccgataaggaaaacaatcggcctattaaagacagaagaattaaatccaagtaaggtacctactaaaaacggcggactacttgactcttccaaaatcacagaaggcgcaacaatctttttaccagttgaaaaatacggcgcatcacttcatgtcggcaatgttcgagcaacgactggtttcggaaaaataacagcaacaagtgcagaggcgccggcggaagtcactttacgactacaaatccttaaaaatcgcacggctccaacgccaacaatcatccattaccataacttaatttgtttagcatcagatattacaattgaaaaagctactcaaaaaacaatgcataatatgataactttacttacagaatcagacaagatgacgacagaggatgcgctgttcctcatttctctacaagctgatttccaagtctgcaaactttgtaagccaaacatcactacaagtatcaagttaccattagattacttcccagaaatgccctttttataaaaagaaaaacctcgttgcgcactgcaatgaggtttcttttatattagttcaaaaatgctgccttgatatttcttatgcaggaatccagcaagtttcatcgcttctatttcaactattttttggctttttttagttaactttttactaaggtagaaattaaaaatgattttctcccctgatactttatatcgccacgttccgaaaaattggccgtttattatcaagaccgcctcgatttgtccagcaatgcgccaaatcaaacttgtttctttctcattcgcaagccaattctttttcgcataactaacaaaaagtggatcaaattttcctaggagtaaaggcgtatccatttcttgctcatcgtgcgtttctgttttactataataagtttttccgtcttctccaatatagcaaaaatagttttcaagctgtttttcgagggtcgtcatgtactcgctattgcgcaaaccgctccaatgtttgaaatcctgtattgtcgctggtccgtacgcactaaaataacgatcgatcattgtttcgagccctgtttgatttcgctcgatatttagccattcttcatgggacttcgaatcaattcggctccgatgactataaaatcgagttttaggggactccggcacacaaaacagcttaccatcaagtgaaccttgaatgaaaaccccaccccaagtcattaattcttttgcatggtcgccgaataacgccccaaaagcctctttaggcactttctcgtcgcgcaagagtaattcttccatttctgccaaaaggtcgtccaaatcgtgtcctagtgagtctgtatgctttcgtgaccaattgtttttgtgcgcatacacatcatggacataaaaccaatcatcaggcgcatacatatgcacggtcattctttggccccagattttgattaagtcttttttatcgtaagttatttgcagattttctttcgtcaaattgtctacacggttaaataaactaatctctccaaattgttgatactgggactggatgccaaataacgcacgagttgcttcctctgcggtcgggaatttagactgtagtagtccagaattatgtagtcgattttgagcaatttgcgagtcagttaacgggcgcattcttagtcctcctcttatctttgggatttactatagatgttttactgcataaaggcaagaaaaagacctgctatccgaagataacaggtcaaacaaaaaaagcctgcttcctagcctatgattaaatagactaggaaacacagagctagacaaggaaacacgaagtccccatatcatgacactccacttgctttaaacgttttattattaaactaattcaataataaccattggtgcgccgtcaccgcgacgtggaccttttttcaagatacgagtgtaaccaccttgacgttccgcgtaacgtggagcaacatcatcaaatagtttttgtagagcgtatacaggacggtttttcttcacagtagaaccatctttacctttagcatctacttgtactacttctacaacttcatgacggatgaaagcagctgcttgacgacgagcgtgcaagtctccttttttcccagaagtgattagtttttcaacaactttacgaatctctttagcgcgagcttctgttgtttcaatacgttcaaatacgattaaatccgttgcaagatcacgtagtaatgctttacgttgtgagcttgtacgacctaattttctgtaacccatggaattgcctcctttatcagttttcgtttcttagagataagccaaggtcagccagttttactttaacttcctcaagcgatttacggcccaagttacggactttcatcatatcgtcttcggatttgtcagcaagttcctgtactgtattgattccagcgcgtttcaaacaattatatgaacgaacagacaagtctaattcttcaatagtcatttcaagcactttctctttatggctttcttctttttcaatcataatttcagctttttgtgcttcatctgttaagttaacgaagatacttaaatgctcagaaagaattttagctccaagtgaaactgcttcttctgggctgatacttccgtcagttaacacatcaaacgtaagcttatcataattagttgattgtccaacacgtgtattttccacttgatagttcacacggataaccggtgaaaaaattgaatcgactggaagtacaccaattggcatattttcgcgtttattttgatcagcaggtgtgtaaccacgaccacgagtcgcatttaaacgcacatgaaatttagcattatcacttaatgtagcaatgtgtaagtcgggatttaaaatctcaacgtcgctgtcataattaatgtcagctgcagttactacaccaggaccttgcatatcaatttctaatgttttttcttcatcagaatagatttttagcgcaagttttttaatatttaaaatcatggttgttacatcttctactacaccttcaattacagaaaactcatgtaaagctccatcaatttggatagaggttactgctgcacctggaagagaagataatagaatacgacgtaaggagttacccaaagttgtaccatatccacgctcaagtggctctacaacaaactttccatacttggcatcatcgctgatctcaatcgtctcgatttttggcttttcaatttcgatcattcaaatttaccctccttcaaaacgtctagaatatcagtctttatgtcaaactctctgccttgatagttaagacagtaaaaatctactattggcaaaagaaaacgaccacttatacgcgacgacgttttggaggacgacatccgttatgtggaactggagttacatctttaatagctgttacttcaagaccagctgcttgtagtgcacggatagccgcttcacgacctgaaccaggacctttaacagttacttctaatgttttcaaaccatgttcttgtgctgattttgctgcactttcagctgccatttgcgctgcgaaaggagtagatttacgagaacctttaaatcctagggaacctgcacttgaccaagctaaagcattaccatgtgtgtcagtaatcattacgatcgtattattaaatgtagaacggatgtgtgcaataccagattcgatattctttttcacacggcgtttacgagtatttgttttacgagccattcactaactacctcctttactattatttctttttgcctgctactgttttggacgggcctttacgagtacgggcattattttttgtattttgtccgcgaactggaagtccacgacggtgacgcatgccacggtaagaaccgatttcgattagacgtttaatgtttaagtttacttcacgacgaaggtcaccttcaactttaatacggtctaagatttcacggattttacctagctcttcttcagttaaatcacgagtacgagtatcttcagaaacgccagcttcagcaagaacttctttagctgtttgtttaccgataccataaatgtaagtcagggaaataacaatacgtttttcacgtggaacgtccacacctgcaatacgtgccatttacttaagcacctcctcttatccttgtttttgtttatgttttggattttcacaaattaccattactttacctttacgacgaataactttacatttttcgcacataggtttcactgatggtcttactttcatatagatatacctccttgtttattagagaaaatgtctctataaaccgataatttctaagctggttaaaccagaccggtatataaattcaatttcggagtgcaaattatttaaaacgataagtaattcttccgcgtgtcaggtcgtatggagaaagctctactgtcactttatctccaggtaaaatacgaatgtaatgcatgcggattttaccagaaacagttgccagtactttatgaccattttcgagttcaacattgaacatcgcgtttggtagagtttcttgtactacgccttctacttcaataacatcttcctttgccatatgtttgctacctccttcttgtattcttggatttgttcctgatgcaggcctaatcctttcagtgtaactatttctcttacatgaaaaaaacgtaaaacatgcaaaaatggatgcacttcattaaaaggcaacacatttcgccagcttttcagacaacctgtaaaagtgaaatccgtaaaaaccagaagaactgtcactcgcaaaagcattgcggctgaacagatcaaggtagaacatatacgtcattcggatgatcttcaaacggttctctcgttcatcatgatttgcttagatgcctttaattccactgccaattatccattatactacaaactaatctaatttgcacgcattgattttgacagtgattcagcacagctcactcctcaaaaagaagcaagaattttttccacatctacaaaaacgtctttaatttcttgctcgccgtttatgttatgaagtttacccttttcagaataaaaatctagaagcggcttggtctgtttcatatttacatttagtcgtttttcaaccgtttctttcttgtcgtcatcgcgttggtaaagttctccaccatctaaatcacatttcccaggtactttcggtgggttgtaaatttcgtggtaagttttaccgcaagttcggcaaatccagcgaccggtaagacgtttcatcaaaacatctttttcaacatcaatgttaatgacagcatcaagttctgtccctaaatcacttagaatgttttctaattcttgcgcttgttccacagtacgtggaaaaccgtcaagcaagaaaccatccttagcatcatcttcgcttaaacgttcacgaacgataccatttgttacttcgtcaggtacaaggtcgccattatccatgaacgatttagccttgcgtcctaattccgtattatttttcatagctgctcggaacatatctccagtggaaatatgaggaatgttgtatttctcaacaatctgttccgcttgtgtgccttttccggcgccgggcagtcccattaatactaatttcaactgtttcgccccttattacgcgctagctcctgctaggaaatcctaacaagaactgcgtgttatttgataaatccccgatagttcctttttacaagttgtccttcgagttgtttcgtagtatctaatgctaccccgataacaattagtaggcttgtaccaccaacggcaagtgactgcggtaaactaaacacagtagtaccgatagttggaagtatagcaaccgctgaaaggaaaattgcaccaacaaatgttagacggtaaagtaccgatgtaagataagcttgtgtttcccgaccaggacgtttactaggaatatacccaccttgctttttcaagttgtctgcaactttctcagggttcacttgaatgaaagcatagaaataagtgaaagcaacaattagtgcaacatataaaatcataccaattggttttgtgtaatcaaacacgtctttcaatacttttacaacatcgttactttgatcaaagaaagtaaggatagtttgtggtgtaataataaatgcacttgcaaagataacagggataactccggcagagttaagttttaacggcaagtgcgttgcttgcgcgcccgattgttttgctcctgctacacgtttagagtattgaattggaattttacgtaatgcttgttggaagaagattacagctacaacaatagctaaaatcgcaacccctacaccaactaatgtcagaacatgtaggaaaagttgatcaccagcgttttcaatttgcgaaacatataattgacgaactccatcaggaatacgagcaacgatacctgcaaagataatgatggaaacaccattaccaacgcctttaacagtgatctgttcacctagccacattaagaacattgtaccagtagtcaatacaatagcgataattgcatatctaccaatggaaggttcaattactaagccagctgaagacatgcggttaaatccgtatgccataccgaaagcttccactaaaccaagtccgattgtcatgtatctagtaagttgattgagttttttacgacccatttccccttgcttcgaccactcagtcaatttaggaacaacgtccatttgaagtaactgaacaataatggaagatgtaatgtaaggcattacacccatggcaaaaattgagaagttttttaaagccccaccattaaatgtatttaagaaccccaaaataccgccatccatactagattgtaaagctgctgcgttaactcccggtactggcacgaatgtaccaatacggaaaataactagcattgctaatgtaaatagtatttttttacggatgtctgctactttgaagaagttaactaacgtttgaaacattagatcacctcagtttttccgccagctgcttcaattgcttctttcgcagctgcagagaatttgttcgctttcacagtaagttttttctcgatatttccattagataaaatcttgattccggatttttcattacgaataattccagtttcaactaaaagttctggtgttacttctgtaccatcttcaaagcggtttaaaacatctaagttcacgatagcaaattctttacggttgatatttgtgaatccacgttttggaatacgacggaaaagtggaagttgtccaccttcaaaacctaaacgtacgccaccaccagaacgagctttttgtcctttatgaccgcgtcctgaagttttgccgttaccagagcctgttccacgaccaacacgattacgttctttacgagaaccttctgaaggcttaagttcatgtagtttcatgtcaagcacctcctcctatttaacaaattctatcaattgcataataattttaagcttaaacttctttgacgtccactaaatgacttactttagtgatcatcccacgaattgcaggattatcttctttaaccactacagaatttgttttaccaagacctaatgcttgaacagttttgcgttgtggttgagggcgtccgattaagctacgttttagagtaatttctaacttcgccataatgataattccctccttatcctaacaattcttctactgttttgccacgaagtttcgcaacatcttcagcgtttttcagttgtttaattccgtcgattgtagcacgtaccatgttaattggtgtattagatccaagcgatttggaagatacatcagcaacaccagcaagttctaggaccgcacgaacgggaccaccagcagttacaccagaaccggcactagcaggtttaagaagaatttctccgccaccaaaatgtccgactacagtgtgtggaatagttgtgtctacagttggtacaagcaccatgttctttttagcatcctcaacagctttacggatagcatctggaacttcttgcgctttaccagtaccgaaaccaacatgaccatttttgtctccaacaacaacaagtgctgtgaaacggaaacgacgtccacctttaactactttagcaacacggttgattgtaacaacgcgttcttctaaatctaatttgtttccatcaatttgctcaggcatgtaatatgtccctccttcttattaaaattctagtccattttcgcgagctgcttcagcaagagctttcacgcggccatgatataagtatcctccacggtcaaaagtgacagaagtaatacctttttcggaagcacgtttagcaactagttcgccaactttgcttgctgcatcaactttggattcagcagaaccgaaatctttatctaaattagacgcacttgcaagtgtcacaccatttacatcatcaataatttgagcataaatgtttttgtttgaacggaatacgtttaaacgtggacgactttcagttccagaaatcttagaacgaacacgagcatgtctttttttacgtactttatttttgtcgattttggtaatcacacgactcacctcttctctcatttgcctaattaagcggcattatttaccagttttaccttctttacggcgtacatgttcgccttcgtaacgaatacctttacctttatatggctctggtggacgtacggcacgaatgtttgcagctaactcgccaacgtgttccttgttgtatcctttaacaatcacttgtgtgtttgcaggaacttcaatatctacgcctttaggagcaacaaactctactggatgagagtaccctacgttaagaacaagcttatcgccttgtttttgcgcacggtaaccaacaccgataagttctaatttcttttcataaccctcggaaactccgacaaccatgttattaagaatagcacgagttgtaccatgaagtgcacggtggtttttattatcagtcgggcgagaaacgttaatttcgttgccttcgattttaatagtaatttctgggttgaactcttttacaagttcacctttaggacctttaactgttgctgttgatccattaagtgtaactgttacacctgcaggaatcacaatagtttttttacctatacgggacatttattgcacctccttatggtttactttttcttaccaaacgtatgctagtacttctccgccgacttgtttagcacgggcttctttgtcggttaaaacaccttgggaagtagacacgattgcgatacctagaccgttaagtactttaggcacctcagttgattttgcatatacacgcaaacctggcttactaatacgtttcaaaccagtgattacacgttcgccagtcgctccatattttaagaaaacacggattgttccagcattgtcatcttcaatatactcaacgtcacggataaaaccttcacgcttcaatatttcagcaatttcttttttgattttggatgcaggcagttctaatttatcatgtttaaccatgtttgcattacgaatgcgagttagaaaatctgcaattggatctgtcatcaccatgtataataccctccttccttaaactctttcttaccagcttgcttttttcacgccgggaatttgacctttataggcaagttcacggaaacaaatacggcataatttaaatttgcgaataacggaatgtggacgaccacaacgttcacaacgagtatatgcttgaacagcgtatttaggtgtacgtttttgcttcgcgatcatggatttcttagccacgttttcgcctccctactaaaattagttttgattacttttgaaatggcatccctagttgagttagtaactcatgagattcttcatcacttttggcagttgtaacgattactacgtccataccgcgtacttttgatacttgatcgtaatcaatttcagggaaaataagttgctctctaacacccaacgtatagttaccacgaccatcgaaagcttttttcgatacgccacggaaatcacgaacacgtggaagtgaaacagtaactaatttatctaagaaatcatacatgcgttcaccacgcaaagttactttagcaccgattggcattccttcacgaagacggaaaccagcgatagaattttttgcttttgtgattacaggtttttgaccagtgataagagctaactcctcaactgcactgtctaaaactttcgcatttgctgtagcgtcaccaacaccagtgttgattacgattttatctatttttggaacctccattacggagtcataattgaatttgctcattaaagcaggaacaatttccttaagatattgatctttaaggcgattcatgtaatattccctccttcctacgactattatttatctattacttcaccggatttttttgctacgcgtacttttttgtcgcctttaacttcgtatcctacacgagtaggttcacctgttttagggtcaattagcattacgtttgaaacgtggattggtgcttcaacattcaagattccgccttgcgggttgacgttggaaggttttgtatgttttttaaccatattgattccttcgataagtacgcgatcctttttcggaaatgctgcgagcactttgccggatttgcctttatctttaccagtaataacttttactttatcaccttttttgacatgcattggtatagcacctccttgatttcttggaacttattttttaaagaacttctggagctaaagaaacgatcttcataaagttgttttcacgaagttcgcgagcaacaggtccaaaaatacgtgttccacgaggacttttatcgtcacggataatgacacatgcattttcatcaaacttgatgtaagaaccgtcttgacgacgtgctccactcttagtacgaacgattactgctttaacaacttcaccttttttgacaacgccgcctggtgttgcttgtttaacggtacacacgacaacatcgccaatgttagcagttttgcgtcctgatccacctagtactttaatagttaaaacttcacgagcaccagagttatcagccactttcatacgactttcttgttgaatcattaggacaccctccttccagaataacgggtcggaaaaattgcactcggcaacttttcacaatctatttttaacttttgatttagataattactgcttcttctacaacttctagtaaacggaaatgtttagttgcagacaatggacgagtttcggaaatacgaactacatcgccagtttttgcaatgttattttcatcatgcgctttgaattttttagaatacttcacgcgtttaccgtacaaaccatgtttcttgtacgtttcaacaaccacggtaattgttttatccattttgtcggatacaacacgaccagtataaactttacgttggttacggtcagccatgtattaaaacctccttacgattcttttttaagcaagttctctttctcgaacgattgttttcatacgggcaattgctttacgaacctcacgaatacgtgcggtgttttctaattgaccagtagctaattgaaagcgcaggttgaagagctcttctttcaaagctttttcttgatcttggatttcggtagtggataaatcacggatatcattagctttcatttgcttcaccaccaatttcttcacgtttaacgatcttagttttgaccggcagtttgtgtgctgctagacgtaatgcttcacgcgctacatcttcaggaacacctgcgatttcaaacataattttgccacgtttgactgggcttacccaaccttccggagcacctttacctttacccatccgaaccccgattggtttagaagtgtaagatttatgagggaaaattttaatccaaactttaccgccacgtttcatgtaacgagtcattgcgatacgagctgcttcgatttgacggtttgtaatccaagaagcttcaactgcttgaagaccatattcaccaaatgcaacttcagttccgcctttcgcgcgtccacgcatgtttccgcggaattcacgacggtattttacacgtttaggaactaacattattattttcctccttccacattgtttttcttcgtaggaaggacttcaccgcggtagatccagactttaacgcctagtttaccataagttgtgtcagcttcttcccatgcgtagtcgatgtcggcacgcaatgtatgaagaggtactgttccttcgctatagtgttcagcacgagcgatatccgctccgccaagacgaccagatacttgagttttgataccttttgctccagcacgcatagtacgttggatagcttgtttttgcgcacgacggaaagatacacgaccttccaattgacgagcgatgttttcagcaaccaattttgcgtctaggtcagcacgtttgatttctacgatgttgatatgaacacgtttttgagtaagttcgtttaagtttttgcgtaatgcttcaacttcagaaccacctttaccgataaccataccaggttttgcagtatgaatagtgatattcacacggttagctgcacgttcgatttctacacgagaaacagaagcgtcagatagacgttttgcaacgtaatcacggatgcgtaaatcttcatgtaagaagtccgcataatctttttccgcgtaccatttggagtcccaatcacggatgacaccgatacgcatacctattggatgtactttttgacccacgaattatccctccttcacttcagataccacaactgtaatgtggctagtacgtttgttgattgcacttgcacgaccttgtgcacgtggacggaaacgtttaagtgttggaccttcgtcaacaaatgcttcctctactacaaggttgttaatgtctaaatcatagttatgctctgcgttagcaatagcagattttaatactttttcaataattggggaagccgatcttggagtatacttcaagattgcaattgcttcgccaacttgcttgcctcgaattaaatcaatgacgattctagctttgcgaggagcaatacgaaccgttttggcaacggcttttgcgcttgtaacttcacttgccattaggatatcctcctctcaaattagcgtttagtttttttatcgtcgcccgcatgaccgcggtacgtacgagttggtgcgaattcgcccagtttgtgtcctaccatatcttcttgaacataaacaggaacgtgtttacgtccatcatatactgcgattgtttgtccaacaaaagttgggaaaatcgtggagcgacgagaccaagttttaattacttgtttcttttcgctttctgctgctgcttccactttcttcatcaagtggtcatcaacaaaaggtccttttttcaaactacgacccatgacggaacctcccttcgcatagtcaggaagctgagaacgcatgtcctcgctatcctgctaccaattttattcaatctattgatccgattattttttcttacgacgacgtacgataaatttatcggagttgttgtttttcttacgtgttttgtatccaagagttggtttaccccatggagacattggcgatttacggccgattggagctttaccttcaccaccaccgtgtgggtgatcgttcgggttcattacagatccacgaacagttgggcgtttacccatccaacgtgaacgacctgctttaccgatgttgataagttcgtgttgttcgttaccaacttgaccgattgtagcacggcaagtagcaaggatcatgcgaacttcaccagagtttaagcggattaatacgtatttgccttctttaccaagtacttgagcacttgttccagcagaacgtactaattgtccacctttaccaggtttcatttcgatattgtggataacagtacccactggaatatcttttaattctagtgcattaccgactttaatgtcagcttctgctcctgaataaattgtttgacctacttcaaggccttttgctgcgatgatgtagcgtttttctccatcagcatagttgattagagcaatattagcagaacggtttggatcgtactcgatcgttgcaacgcgtccaggaataccatctttgttacgtttgaaatcaatcacgcggtattggcgtttatggccaccgccgtgatgacgaacagttaacttaccttggttattgcgtccggctttctttttaagaggacgtagtaaagatttttctggagtacttgtagtaatctcagcgaaatcagaactagtcatgtgccggcgcccgttagtggtaggtttatactttttgatcgccattgtttcccctcctcgttagatttatttaaagttagtcgaattatacttcaaagaattgaatttctttgctgtcagctgtaacagtaacaatcgctttacggcgtttgttagtgtaacctgcataacggcccatacgtttaagtttgcctttgtaattcattacgtttactttagcaacttttacgtcgaaaatttcttcaactgcgtattttacttgcgttttagttgcgcgagtatctacttcaaatgtatatttcttatcgtcgagaatgcttgtagattcttcagttacaactgggcgcttaatgatgtcgcgtgcatccattatgcgagcacctcctctactttttcgacagctgctttagtgataattaatttatcatgtttagcaacttctagtactgagatactttcagccggaataactgtaatgccttgtaagttgcgtgcagataattctacattttcactttcaccagcaactacgattagtgccttagtatctacagagatatttttaagaaaagccgcaaattcttttgttttaggtgcatcgaaagtcaaaccttcaagtacaactaatttttcttcatttactttagaagaaagaattgatttaatcgctaaacgacgaactttcttaggtaatttgtaagcatatgaacgaggtgttgggccgaatacgacaccaccgccacgccattgcggggaacggattgaaccttgacgggcacgacctgtacctttttgacgccatggtttacgtccgccaccacgtacttctgaacgattttttactttgtgagtcccttgacgtagggatgcacgttggctcaaaatcacatcaacaacaactttttcatttggttcgataccgaaaacagtgtcgtttaaagtaatttcgccagcgtttgttccatcttgtttaagtaagcttaattttggcattcgttagtcctcctttccaaatgaattattttgctttagtagcagttttaatttgaactaatgcttttttagcgcctggaacgttaccttttactaaaagaacgttcttttcaacgtctactttaacgatttcgaggttttggatagtgatttgttctccacccatacgacctggaagtagtttatttttgaaaacacggttaggtgctactggacccattgaacctgggcgacgatggtaacgggaaccgtgggccatagggccgcgtgattgtccgtggcgtttaataacaccttggaatcctttacctttcgatacgcctgtcgcgtcgatgatgtcaccttctgcgaatacgtctacttttacttctgcaccaatctcatactcgtctaagtttacatcgcggaattcgcgaatgaagcgcttaggagtagtattggcttttgctacatgaccttgttcgggtttgtttgacaaaattgctctcttatcttcgaaaccgatttgtacagcttcatagccgtcagtttcaacagttttcttttgaagtaccacgttttgtgctgcttcgattactgttactggaataagttcgccgttttcagtgaaaacttgtgtcatccctacttttctacctaagattcctttggtcatgagtcacacctcctgttaatttaatatattcttattatagtttgatttcgatgtccacaccgcttggcaagtctaaacgcatcaagctatcaactgtttgtggtgttggattaacgatgtcgattaaacgtttgtgtgtacgcatttcgaattgctcacgagagtctttatatttgtggaccgcacgcaagactgtgtagattgacttctctgttggaagtggaatcggaccagatacggaagcacctgagcgtttcgctgtttctacaatcttttctgctgattgatccaaaatacggtgatcataagcttttaaacgaatacgaattttttgttttgccattactttccctccttttcgcctacttttaaaatagacattctccgtgaaaattacctgaacatccgccatggcaaagcggccgggtgtgtcagcaacctttcacttcatcacatgggcattcccggcaataccggggtgctcgttgtcaaaagggcagaccaatgcctgtccatttgcactttatctattatacacgggttaggggtagtaatcaaccgctttttgaaaaaagttttaagttattttcatagaatcttttatatagaagattctcggttccgctttgcgtataaaccgcatgataaagctgtttttcaaatttcgccaaaaagaaaaaacatccgttaatatcgaatgtttttaagatgttcttagtattacgagtcctgcggttaaaagtatcattacgcatgccgcaatcaaatctccaagatgccaatgcaatattcggaatcgcgtgcgcccttcgcctccttgataccctcttgcttccattgcatccgctaattcttccgctcggttaaacgaactaacaaataacggaataaaaatcgggacaacaactttcatttgttcaaaaagattgccttcaccaaaatccactccacgagctcgctgtgctttcataattttatctgtttctcccatgagagttggaataaaacgaagtgccaccgaaatcattaatgcaatgtcattcacaggcactttaagcactgcaaaaggacgaaggatataagcaatcgcgtctgttaaattcataggcgtggttgtgagtgtgataacagtcgacataatgataattaaaacaaaacgcaaaaatacaaatacaccgtttaacagcccaaaagaagagatggtaaatggtccccaatcaaagtaaatcgttcctccgctcgcgaatagtatttgcattactacggtaaataaaatcaaccaaataagtggtttaacaccttttataaaaacttttagcttgatgcctgtcatttgaacgaccattagtgtgaacaaaaccatcaatgcgtatgtccaccagttattcgctaaaaataaaataccgatataataaaatcctgctaaaagtttcgttcgtgcatccagaccatgaatcaaggactcccctggaacaaaacgacctaatattagtttttcaatcattcaaagaagcccccttttcttatgtcagttgttgaagtaccacactcactgccatcaaaattgtcaatgtcgcattaattaatacgaaattacgaataccaatgacaaatgtttttgattttacttgttctttattaaatttaactagattacgatacactggatagatcgttattagtgatagtaacatgattggatgtaagaagtttatagctaccgaaacaaccacagctaaaaatgaagcataatataaagtattaaataacaatactcccatctttcttcctatatagtatggaagtgtgtaacgatgattccgaatatcttcatctaaatcacaaagattattcgcgagcatgatattagctattgtgaaaatacatggtaaggataccacacctatccgaataatttctattagattgaactggattgtcaccatttctccttgccaaagtaaattcgcaattcctgcatcgtaggcatttacatatacagctaagaagaaaatcccaaaccccatcgttacgcctgaaaaaatttcacctaacggcatacgagaaagcggcacaggaccaaacgtatataagatacctatacaaaagcatacaaatccaattaaaagtactaaaagatctgtccgaaaaactaaccaaacacctaatcccgttgcaatgaaaaacatcaggaaaatagtaataataactgtacgtaccggaatttgctcttgtccgattacgttactggtagttcggtaatcgtagtcatgattatctgttgctttgcgataatccatatagttattaatcgccgttgttgttaaatcaaatatgagcatagatccgaaaataatcaacgtattaatgggtttgaacatatcatattgatacacaacgaatagcgttcctaacatgaatggaaaaacactagcaatctttgtttggatttcaaccaacttcagaaacgatggtattgacatatcccctttttagccccttttctagtttattgtgagcagaatccagaccggattttgctcactttcttctataataatagtttatttttttagcgtgtccatctggaagtctttatccgttaattcgaattgaccttttaagccagatgtttcgtatacttttttctctttgcttataaaaatggcatctacaccttcgaattgttcaatgtagtccattccacctttaatccctttggagaaagtagcggttgataagccatcaccgtcaattgattttttagatacaatcgaaactccagcgatatcattgtcaaacggatatcctgttttcgggtctaagatgtgatgatatgttttaccatccacttcaaggtaacgttcataaataccagaagttacgatagacatattagattcaggaagtttcccaataacacttccacgaggagaaaacggatcttgaattccgacattccatttgttgccatttgggttgttgccttgaacataaatgtttccacctaaatctatgatagaggttgttactttattttctttgaatacctttaaagtttcgtcagtaatgaagcctttagcaattgcccctaaatctagttccataccttctttttccaagtagactgtttggtctttatcattcattttaacgtctttgtaattaattaatggtaacactgcgtcaatttctgcttgagaaggcttgcgcgcatcagaaaaaccgatgtgccatagagatgttaacggcccaatagtaatatcgaagctacctccagagttttcggagtatttaagcccttcttgaattaagtagtatacgtcttcagatactttcactggctttttgccggcttgttcgttgattttatcaacttcggacgttttttccgaatcacttgtggtaatcttggcagctagatctttgattcgatcgaagcctttatcaagcacgtcttctttgcctttgtcataaattttaagcgttacaaccgtgcccattagaaagtctgttttggagtatggttgatccattagtttttttgaatcacttggttcactctttgtttctttactagaatttccacacgctgatacaacaagcgccaatatgataactgaaattattattttccatttcttcattagctttttcacctttctaaatccgtgatctttacttgaataactatagcgtaaaaaaaggaataaatctacagtaaaaaggcttaattcctctgtttttcgataaaaaaatcggctagccctagaaattagggccagccgttttgtacataaattgtgctaattattcagcttctactaggttgtacactttaattgtgtcagtgttaccattttgtgcagcattttgaagttgagctgcgtagattttgaattggttagaagagttagtagcaccagaaacagtgtctactgcagcaacgtcttgtttttcaacaagagatttgttaagtgctgggatgtattcttttggaccagtaccagatttagctttcatgtttttctcgtagtcagcatcgtctgatttaagtttgccgtctttgtcaacatagttgtagtcagatttagtgattttgccatctttaacgtccatgctgaacactacacggtaaccatgtgcgtaattttgttcttcaagtttataagttccatcttccattttagctaagttgttgatggaaattgtagttgtatcagctttttgagctgcttggattaattggttagcatagttgatgaaagcgtcagaagaatgagttgctcctgaaactacttctacagatgctgcagattgatttttaactaaagaatcgcttaattgtttcaagtattcttgaggaccagttcctactttatctttcattgctttttcgtagtctgcatcttcagattttaatttgccatctttgtttttgtaatcgtagttagcttttgtaattttaccatctttaacttcgattgacatgaaacctttccagcctttgtcgtcgaaattcttttcttctaatttgtaagtaccatcagtcatagtaccatcagttttagctgttttctttgtttctgtttgttttgtgtctgtgctcttcttgtccttgctgctgtcgtcactgctaccgcaacctactagtaataaacttgaagccattactacggtaatacccattgctacttttttcaatttcatgttttgctcccaccttttgttttattgattaactttgtttgtgatttcgtgaacacaaaccgatagtctgcgaaagcgatatcacttttacaatacaaatgataccatcagcgcccggttttgtctactgtaattctaaagacataattcatctaattttcaaaataatgactattgatatacaaaagatggcttaaaccaaccttttctagcaaaatagcaaacaaaaatgtctaacatcctatgttaaacaaggacttttagcctgcttaattatgtaacatttgcacaaagtcctatttttcaaatttagattagaattgttctttactatctagacattagtaggaggtttctgttaaactatgataggttataataatactgtggggaattttggactcattttatttttgtgaataaacttacaaggagttgaggaagcatatgcctgaaaagaatatcgttttaattggggcaggatatgcaggtgtacacgctgctaagaaattagctaagaaatacaagaaagacaaagacgttaatattacattaatcgatcgtcattcgtaccatacaatgatgactgaactacatgaggttgctggtggtcgtgttgaaccaactgcaattcaatatgatttacgtcgtttgtttaatagaacaaaagttaatcttgtaactgataacgtgacacatgtagatcatgataaaaaagttgtaacaacagagcacggtagttatccgtttgattacctagtacttggtatgggcggagaacctaatgatttcggaactcctggtgttggcgaaaatggctttacactttggtcttgggaagattctgttaagttacgcaatcatattgaagaaactgtaacgaaagcatctcgcgaacaagacgttgaaaaacgtaaagcgatgttaacattcgttgtttgtggatctggatttactggtatcgaaatggttggggaacttttagaatggaaagatcgtcttgctaaagataacaaaattgacgcatctgaaattaaactagttgtagtagaagctgctccaacaatcctaaacatgcttgaaagaagagacgctgacaaagcagaacgttacatggttaaaaaaggtattgaaatcatgaaaaatgctgctatcgttgaagttaaacctgaaagcatcgtacttaaatctggcgaagaacttccaacaagcacattaatttggactgctggtgttcgcgctaactccgatacaaaagattacggtatggaatctgctcgtgcaggccgtttgaaagtaaaccaatatatggaagcagaaggtcttaaagacgtttatgttgttggtgaccttgcttactttgaagatgaagaaggcaaaccaactccgcaaatcgttgaaggtgctgaacaaactgcactaactgcagcgaaaagtatcatcgttgaaatgagcggtactggcgagaaagaaccattccaaggtaaataccatggtgtaatggtttctattggagctaaatatggtgttgctcatcttggtggcatgcatctttctggttggttcgctattttaatgaaacatatggttaacttgtactacttcttcggtatccgtagtggttactacatgtggcaatatattatgcatgaattcttccacattaaagatcaccgtaatatcttccgtggttggacttctcgttacggtaacgtactttgggttcttcctttacgtgtatatctaggttggttctggattgacgaagctctttctaaaatctacggtgaaactacatgggataaagtaagtatcacaaatttaaaacctttatttaacggtatcggttctgactcttggttaactgcaactacctctaaaatgccattcgaatggttacaaactgctgctacatctggtgctagtcaagctgccggtgatgctgctggggctgctgcaacaaacgtaactactccaattcttagtcatatgcctggttggttccagtggattatggaacttctaatgccaaatcttgatgttgctctagtaatgcaaaaagttgtaccttttgttgaacttgcaatcggtcttgctatggtagtaggtctattcacttggcttgtaagtatcggaagtgctggattcctagtaatgtttacactaagcgctatgcttggttgggacaaattctgggcgttaccagcttctatcgcacttctaaatggcgctgggcgtacatttggtcttgattattgggctgttccttggttccaaaaacatcttggtcattggtggtacggtaagccgagatccgtttacagagacaagtaaattagttagttaaaattttaaataaaaactcgggagtgcatccaaaagccagttttggcataggaggtgcttccgtttttattatttgttgatttcttgaactttttcctattatatttaggcataatcctttaaaataggatttgtacatgacattttgaaaggaggcaatacggtgaagaagtatctttctatggtgaagcgttgggatattattattattttatctctttgtatactctcctttttgccgattgctattttttcatatgtaaaagcgaatgaaccggctcctgctaacggaaaaaaagagcttgttgcagttatttctgttgataataaagaatataagactgttacactcactggacataaaggaacggaaagctttgatgtgaaacaaccagatggacatactaacacgattgaggtttcaggggaagaaatccgaattagtaaagcgaactgtaacgatcaagtatgtgttcggactggagcaattgataaacaaggcgataccgttgtttgtcttccacataagttagtaattgaagtaaaagcgagtgacgggagttcaggcgattcagatgatccgattatctcttcctgaccttatcctctaatagataggaaagtgtttttatgacaaaaaacagacgattagtatatatagcacttttggctgctcaagcggttgtcattagtttactcgaacgggctattccgtttccatttgcgtttgctcctggggcgaaactaggtcttgctaatattattacgtgtatttcgctttatacgttatcggcaaaagatacatttatgattatctgcattaggttagtattatccactttgcttggtgggacaatttcaacctttatgtatagcgcggccggagctatcttgagttttcttgggatgtggctcgtacagcaacttgggccgaaacgcgtgagcatcattggcgttagcgttaccggtgggattttacataacgttggtcagctcgtaatcgctagttggattgctggtacttggtccgttatgctttatttaccagtattatctttcatcggaattctttctgggattgcggttgggattgctgcaaattacctactaaaaaacgtccaaactttgcggatgttcgctgatgctaaacaaagtcaagcagcacaaaaataacttttaaaaaaggagttcaatatgcaacttcatgctatgtgggatgagtatcctgcactttccaaagatttacaagaagtcttacaaacgattgaaaaaaatattcaaattcgcgataaacacgttgagcaaaatgtgaaagatttgattcatgccggcgggaaattactgcgcccagcttttgcacttctttctgctcaagctggtcctgattatgataaagaccgcgctgtttcgattgctgctgcacttgaagtacttcatatggcaacgttgattcatgatgatgtcgttgatgattctccgttacgccgtggcatcccgacaattcattctaaatatggtcgtaattatgctgtttatacaggcgattatttattctgcatctgtttcaaaattctatccgcacatgcttcttccgtggagaacattgaatttaatagtaaaaatatcgaaaaaatcttaatgggcgaactagatcaaatgcgcacgagctataaaatgaacgtgaccgttcgcgagtatttaacccgtatttctggtaaaacagcacaattatttgcgcttagttgttactccggtgcaacaggtagtaaagcaacacgaatgacagttgcaaaatgttataacatcgggcattatcttggcatggctttccaaattattgacgacgtactggattacacaagtacggatgaaggtcttggcaaacccgttttaaatgatatgaaacaaggtatttattctctgccacttatttatgcaatgaaaggtcacttggctgaattcgagcctcttctttctcaaaaactagatatgacggatgaagcttccgaacaagttttagcacttatttctaagtataaaggtgtcgaacaggcgttcaaacttgcaaaaaaatatacgaataaagcgcttcgtgaaatcaaaaaactaccagctggcgcatatcgtgaagatatgtaccgcttgacgaaaaacattttagatagagatatctaaaccgtttagaacattgctccttccatattgagttttgttctaaattttggaacttattgtgaaaatacaaacatgaaagcgtgattaacgtgattcgattttttaaaatagttacaccgatactcctatctatctctttagttgcttgtagttccgcaagtggtaaaacggagaaaattactgcgccaattgagaaagaccgtaatttatcgatggtcgtaacgacggatgttcattactttgcgccatcactaaccgacaacgggaaagcttttgaaaaatatgtggctgcgggtgatgggaaacagttagcttatagcgatgaaataaccgatgcttttttagcagatgtagagtccaaaaagacagacgtccttattattagcggcgatcttacaaacaatggtgaaaaaacgagccatgaggaattagcaaaaaaacttactcaagtagaaaaaaatgggacacaagtttttgtagttcccggtaatcatgatattaataatccatgggcccgtaaatttgaaaaagataagcagctaccaacagatactatatcaccaacagacttcagcaaaatttatggtgattttggatatgaagatgctatttcaagtgatgagttttcgctgagttatttagcagctccttcttccaaagtatggctgttaatgttagacacggctatttataaaacaaatatgcagcaaggaaatcccacaacggaaggcggactaacagccggaacattagattggataaaagaaagtagtgcgcttgctaagaaaaatggcgctaagcttatccctgttttgcatcataatttaactgatcataatgatgtcatccaaaaaggttatactattaattataatcaacaagtgattgatgctcttacggaaggcgctatggatttttctctaagtggtcacatccatacgcaaaatatccgttctgcgaaaagcacagatggcaaagaaatcaccgatatcgtaaccaatgctctctctgtttttccgcataaatatggcaatattacttatagtgccaaaaataaaaacttcacgtatcaatctcaaaagttagatatggaagcctgggcaaaagcgcaaggctctacggatgaaaacttgcttaattttgatcagtttgattacgaaactttttataatagtggctatgataaggcaatgatggatttaatgaccgatgagtcttatgataagtacaaccaagcagataaggaaaaaatggcagatacgatgggattaaataacatgtatttcttcgccggaactgcccctccaaaatctgatggtatggctttatgggattctgcaccgaattcatttttgaaagattacgttttaagttcgtccaatccacctaagaaaagtaatgactattatgttagtccttaaataataaaaaactggtagccgttgtggcttaccagttttttgtattaactagatgcagctgccgcactcgctgccgcagctgcacttaccgcagctgcttgttccattgcaatcaatatatgcacattgaccattaatccttctaattgttccttactcatttgaccagattgtttttccgtatataggcttatcgctagagctgtaacgaattctcgtccgaaacgcaagccgggttgttgctgtaattcatcaattaagttcactaaccctgaatcgatttttcgcccatccatgacaaaagctaaaattccaatactcgagtaatgtattggttttacttttatccctttttggcgtagttcttctacaatattatctactcttcgaatgaatttactatctttttcaccgtacaaaagcgttcctgttgttgctaaaaattgtaagctatcatttttgcggaaaccttttgcagcaaattcttggaaataatattctgtcacttcagccaattccgtggtgttttcttctggtagattagctaggaaaacggcggttgttacatcttcacttttggttaaaaacgggtgatcttttttgaaaagttggtggatcgtttttgctttttgggctgtctttgttggattttctgattctaataataagtatgccgcaaagtaagtatattctgtgcgctggaatcctgcttggattaacgtgttatagttagcaattacttgctgaacgctctctcggctggcattattgtttgccataagtaatcctacaagagatgcgcgaacatttccgtttagcgctgtgaacatgcctaattgtcgcttaatttctttatttatttcattgaatctctccggattaaccacttcattatttcccgcaaaaagacgagcaattagaaatcgaattcgtttatcaataaaactaacaccactcgttttcactaactcatagttcttcatcaataatttcgttgcttgttcgctatcaaatacatatgctgaatccatcggctacactccttcttgttttttgaattaatattcctctctgtacaaactcaaaataaacgcttcaaaattatcagctagcttcattattttataatcagcctcttgatcaatatgaacgactgcgggctcgcctgtttttccgcaatttcgataatccaagaaaaccatatcatgtccggctgacgggcaatcggcaatagctaaaccaacatcgggataaccccactcttctatccaaaaatttgtgttgtgcataccattcaatgcagatatcccttggtttcctattcccataatcccagtaatagctacacaattctctgaccatgaacttggctctgtcgtaggaacagaaccggttgatactatacctccattttgggtatggcgcattaagtagatataagatttaggtaacttatagcctagttctgcttcgattgcagccactctttgcggcgtagggtatacatctttatagtcattttcgtaatcaaactctagccaaagctctgctagactatccccttggaaaaatgtcccgacctcactaaaatattcatctaactcagcgaaaatttgcttagctttttcacgttcgaactcgactgcttccagatcttgcatctcttctaaaatcgacatgagctgttgatagatttcgggaaaatgttcgccactttggtagagcacatcgctaagtaataccgttgctgtaaagatatctcttttatttttggttgtcacttcttgtttccaacaagtttcaagtaagcgaatcgcctcttttgtttttcctttgtctaaataatataatgcttttcttgttgtaagcatattattcctccactaaccttaataacttcattatactaaaaaaaccctagggaaacaaaaaccctagggacgctattttataaattcattccaagcaatggaattcgctccttgtatttatcaacaagtgcttgattatgtgcatcggcattttcgacatttccactaataaatactggcggtgtgaagttgtcgtttaccattttttcaattgcttctgcaaaaatggattgcaagatgaccgcgcctgttactgtagatgttggtgcgaaggcgatatcgaagtttgctgattttaggacggcatctcctttaacagcaccgttatcgattacaatgtcacctgtatcggataagcgtttaccagatttgtggcgggatttttggctggccgagtattggagcgaagtaatcacgatgacaaatgcacctttttcgcgggcaatttcagcgacatcaattggtacggggtttcgtccagacgtcgatagcacaatcatgatatcgccaggacggatatcctcctctaccataaatgttttcgcataatcatttttccgttccagcacagatgacgccgcagctccttcgtgaagcataagtggttcatgtaaaatcggatgaatcgcagcaagtccacctgcccggtaaaatacttcctctgttaaaatatgcgagtgaccgcagccaaataaatggattacaccgtcgttttcgatggacttggctaccttcgctcctgcttcttttacataatcagcttcattatcgagaatgttttctaataaacgaaccgtaatatcgacataattattaatcatttaattcccctccaaagctgcaaaaattttctcgatttcttccggctttgttcggccagttgctttgtcaattgtttttccgaaaatatgtggcatgtaaaacggaattcctgtggacttgatggcggttgttatttcaagaatattgtcagctccaattcctcccgctggctcaataccgtaaatgcctttatctgctgcaatttttgttaagtaaactagttcatctaaatatttcgtgccttcaatgctcataaatttaatggacgggatgttggcggatagacaataatcgacagcttcttcagcggtaatttcatctccggaagatagttttacaatacctacttttccggttggtcgaacgagtgcattagtgtatgtttccgggagtaagccatttgttaatcccgcggtttcgattggctggttaatatgactgtttggagccagacgagcaatatgaagaacatcgcgccagttttgccagtctccgccaccaccaaggccaacactaatgacctcagcagtagtttgtagttctttcaccacatttgcggcttcttctgctgtttcatagttcgttgcaacgattcctggaacggcaaaaccgcgcgctgccaccatgacttccaggctattttccttatctttcgctaaaaaattaaatagcgcaaaattattccatttcggtagattttcgaattttttcttgttcaagttttatcaactccacacatgtttttaacgttttttcgatcaagtattcgcctttttctgctgttgccaaagttgcttctcctaaaactgctgtcttggtaaaggtttgccacggggttggcgtgaaatccgcatcgattggtaaaattggcggatcatcaatagcgcgactcatatccgtattttccggtgataagtagagcatgagtgacgtttcaatttcacaagcatgaatataggtatgatgatttgcttttccttcgcgcacgtccattgctaatttttggatattcgggtaaaaaatgtgcaagataaccatgtccgggaacttggcatatagttcgcgcgctgcatcttttaacgccgccatatttccaagatgtccactcactggtacaaacaggcggaatccttgtttatatagactttcaccaatctctacaactactttcgttaccgtttcatttgataacgtcaaactccctggaaaatcttgcaaactccaaacttggccgtatggcaataccggaagtacaaatccatctgttttcgctgctattttcgcagaatattctgacgctaaaatattgtctgtccctaatggcaaatgtggcccgtgcgcttcaaccgctcctattggcaaaatgactggtttcgttttcgtgatttttgcgccaatatcaaatgaattttcatctgcatataacacagatttcgcctcctattttttaaatgtaaaacatcttgctgggttatccacgaagaattttttaactaatttttctccgtcaaagcctttttcgtttgcttcatcaataaagcgtggcacccattttttggcgatgtattcaaggccaggcccgtgaccgtaatgtttataatatgttttccgtgctgtatcaccactaactaaaatctgatcttcaaatccttctgagactagatatagaatcgcagcaattcgggcactttctggcgcgtatttaattttggcaatgccatcgaatgacatgaatgcgcctgtttttgcaacttgtttgtgataatacggatctaggttacgatccatatgcccaatagataaatattctaacgggatattttcttgttttaaaatctcgatttgctctaaagccatcgttcccgcttctgtgtgagaatgaattggtgcttttgtctcgtgatgtgctctagcaaccgcgcgtatcgtcttttcttctaaaggtgtaatcatattataaccagtgccaaatttcacctgaccagccttatacggcgttccttcaagtccattttcgacttcatttacaacgaattccgttagtttttccgttgaagtattttcaatccattcataataggtttcaaaatccccgatgattggcttcagttcaggcttaattttcccatcccacaagaagcttttgttaaaaccggctgttccaacgatttgaatacctgtttctttggaaatttgcgctacatctagcacgcgtctaccgtaatcaaccgccgtcgcatcgacaattgtttttccgcctaagtccgcgaaatcttgtacatcaagttgtgatttttctttatcatctaaaagtaaatcatcggcatttcgctcttgccagtaagccggcacacaaacaatgtgctcgtgtgaataagtgaagcccaactgatccggtgcgatatctccataaaaagtacgaataaaactcattttttaaaacttcctttcaaaaaacctcttcctcttgaatgctagacaaggaagaggtttagattttacttaaaagaataacttcgctaacatgctgacaattggtccgaggataaacatatctgagtcggctgcccacattgctgtatctggaacagtcgtattgataaagaaggtaaccataatatattgtccccaagcaacaaccgtagccgttaagaatccacctattaaggcgcctctcaccccaccagttgagttaccgaatacaccagcaactgccccgtggaagaagagaacaatcattgttggcacaaacacgtagccaactgtatttccaagtactactaaccagataatcgctccaatgaacgcacccacgaaaccgataattacggagtttggtgcatatggataaacgattggcgcatccagtgcaggtttcgcacccggtacaagttttgttgcaataccattgaaggccggtacgatttcaccgataaacatccgcacacctacaagaacgatggcgataccagctgcaaacgtaaaggactgaacgatggagtatacgatgaagctttgatttccagcttctgcgattaattcttctgctcctggtgttttcttcaccatgaggattactgcaccgactacgaacagaattcccattgtaagagctgtaataacgtttgagtcacgtaggaactctaattttttcggtaagttaatatgttctgcatcatttttcttatttccgaatacttttcctagtaaagcggatagaatcgctacactggatgaagtatgtcctaatgcgacgttatcgtttcctgtaattttacgtaagaatggttgtgtaatcgctggttgtaatgtccagtaaagacccataattactgctaagaagagtacaagtccccagaacggaatatctccgccaacagcttgcacagtaattcctgcaaaaatagttgttgtccagaacatcatatgaccagttaaataaatgtacttaaatggtgtaaatcttgctaataatacgttgactaaaaatccgagtgtcatcgcaagtgttacggcactaccaaattttgcattaaaggcttcttgtcctaaaaatcctgcaagtggcggtgtttcaagcccgaatacttctttccacattggttcaaagatcccaagggaaccagtaataacagccgcaccagcgttaataattaagaatccaataattgccttgaacgttccgctaataacttggcttaaatttttcttctgtaaaagtaacccgagaagtacgataaaacctaaaagtatggctggggtcccaaaaaagttattggcaatccacgtaataatctccatttttttcccacctttttttgtcttatttaactattgattgctgcggataatgcatttttaatttctgcgttgtcaaaatagttgttgacgatgactactttggcgcttgtatctgttccaagtgtttctgctaactcttggcttgtaacgataatatccacattcattgagcgagcagctgatacatcaatatgctccacgtctgcgtctactcccatatcgcgtaaaactgtttctacattcattcgtaaaattaagcttgttccttgcccaagtccacacactgctaaaattttcattgttatccctccactaattctccaattgcttggtaatcttctgaatgaatcattttttcaatattatcgttgttactaagcaaggagacgattttttgaatgactttcaaatgtgcctcacttgaagtagctgcgagcccaaaaactaatcgtacgggatcatttgcggcgtgtccgaaattcacgccatcttttagaacgactagtgatactgcagagttttccacaccatccgttggtctcgcatgaggaattgctatttgaggtgcaatgacaaagtacgcaccattttcatgatatgattccaccattttttctacgtactgctcgctcacataacctgcattcactaataattctcctgcttgcacgattgcttcgtcagcatttttagctgacccatgcagattcacaagctctttatccaaaaaagacatatctcttcatcccttctaactaattgatagcgctatcaataacttacactcttattatagctgtagctcctctgtttaaaaaagcccaattcctttcttttcgaaagtgcaaagaatagactgttacattttgttgttatcgagcatacaaaaagccagcgcggcatctttgtgccccactggctttatcgcttattttatggttaacattgcggcaatttccgcggctgatgtcgcttgttcaatctgctctagcaagtgatgtttcatgattaaattagtgagttggctaagtgcattaatatgtgtgtaggagtcaatggaagcgagcacaataattaatttaacctgatccttcgctttacttgaaaatgaaaccggctggtctaaccgtagtaggctcattccaacacggtatgccccgtcatctaccgaagcatggggaagtgcaatccctggtgcaataacgatatatggtccgagtttctcaatattttcaatcattgcatgctgatagttcttcgagatataaccttcttgctgtagtggttttgaagcaactcggatagcttcttgccagtccgtcacactttctttaaaaataattcgttcttgcggtaatagttcatcaagagatggcgatttctctagctggctgtccgattgcacttgaaataataccgactttagcttggccgctaatttttcgcggtcttccacttttgcatattgatctactacatcgagcacggacgataacatgcgcgcatcagaatctttttgtaaaatatgcggagcaattaccttcatcaattgttgcttctgcgcttctgttaaaatcggactaacaataaaaactggtgctttttgttccataattggcaaagtagatacgataaaatctggtgcatacagccccttttcaaactcacggatggaaattggttctaatatctctactcgttcaccaagtaattgcgataattgccgttcaatcatccgcgacgttccgacgcctttggagcaaacgattaagagcttttttcgttcaactaaagtattgtttttgcgtgaaagatagccgccgaacaagattgttacgtacgctatttcatcctctggtattgcttcaccaagcaaatcttctagcggttcgagtgattttttcgtaatctcgtacacatcactgtaactttgtttaatgtctgtacgcagcgggttaatccactcaatttggaatttaagacggtagtatgctggttgtaaatggagtaataaatcttttttcaaattgcgatggtcttcaaaattcacacaagcaaggcgttcaaattcagcaatgattttttcaacgattagatctagttttccttcagcagccgcatcatcattcaaacgactcgcaccaagcaaaagtttacctaaataagtgatttccgcatgattaattttaaaattctcgctttgctgcaattgctgataaatttcctgcgcaataccaaatgattctacttcatgttcttctttctcatttaaataacaattgcgtttcattcgttccttaaagaagaaaatcataataccaatacgctcaataacttcatctgtgtaacgaataccgatttttttctctgtgactgctaaaatttcgaaaatcatatctaatttgggaaataactcctgattttttatcatcggattaattttcattaaatcgagcaactggtccgcggttgcgatttcttcgttattcatacaataatgaataaaaaattggcgtatactccgctcatcacccagaaccatattcccatttttacgatcataagcgagctctaaattaaactgttttagcgctaattttaattgtttaatatcctgtaaactggtattacgactgacttcattgcattcattaatcgtatcgataattactcgcgcatctgttacgagcagaaaaaataaaatacggatgcggcgttcactagctgaaaaaactttgtggctcgcttccctattttcaaggatctctttaattgtcgttttttcttcttctaataaataatacccttgtccacgaacggattgaataccatcaagtcctatattatctaattctttattaattttttctacatcatattgaagtgttcgtttggaaattcctagttcttcttgtaaattctcgggtgcaagatatacattcgccacgacgagcgattcgagtaatgtcatatttcgagcatcaaattgtaccatttggcctacctccttgatttcggtctagaaggtaaaaagatatgtctacattaaggttatgcgaaaatgtgatatttttcaagtatatttttatttttgtatacaaaaaaaccgacaaagccaaatgactttgtcggtttgaatcgtatcagatattatttgctgatgttagaaacaacgccagcgcctactgtacgtccgccttcacggatagagaatttagtaccgtcttcgatagcgattggtgcaattagttcaactgcaagctcaatgttatcaccaggcattaccatttcagtaccttctggaagtgtaacaataccagttacgtcagtagtacggaaatagaattgtgggcggtagttgttgaagaatggagtgtgacgtccaccttcttctttagttaaaacataagtttcagctttgaagttagtgtgtggagtaatcgaacctggtttagctaatacttgaccacgttggatatcttcacgagcaacaccacgtagaagtgcgccaatgttgtcgccagcttcagcgtagtctagtaatttacggaacatttctactccagttactactacttttttgctttcttcttcgataccgataacttctacttcgtcaccaactttaacttgtccacgttcaacacgtccagttgcaactgttccacgaccagtgattgagaatacatcctcaactggcatcatgaatggtttgtcagtatcacgttctggagttggaatgtaagaatctacagcttccattaactcgtcaattttagcttcccagtcagcttcaccttgaagtgctttaagagctgaacctttgattacaggaatgtcatcgccagggaattcatattcagttaatagatcacgaatttccatttcaactaattctagtaattcttcatcgtcaaccatgtcacatttgttcatgaatacaacgatgtatggaacaccaacttgacgtgaaagtaagatatgttcacgagtttgtggcattgggccatcagcagcagatactactaagatagctccgtccatttgtgcagcaccagtgatcatgtttttaacgtaatcggcatgtcctgggcagtcaacgtgtgcatagtgacggctgtcagtttggtactcaacgtgagcagtagagattgtgattccacgttctctttcttctggagcaccatcaatttggtcataagcttgtgcatcagcatagccttttttagcaagtacagttgtaattgcagcagttaaagttgttttaccatggtcaacgtgtccgatagtaccaatgttaacatggggtttagagcggtcaaatttttcttttgccattttaaaatatcctcctcgataattcgataattattttttacttagcttaaatttaaactaagtaatacttctaactaaagttatacttgatgttgcgaaaaaaatcaattaatcttctttgttgtttccaccattagctttaatgatttcttcagcaatagatttaggaacttcttcatagtggtcaaattgcatagtgtatacaccacgaccttgcgtacctgaacgaaggtgagttgcataaccaaacatgtttgcaagtggtacaaatgcgcgaacaacttgagcgttaccgcgagcttccataccatctacacgaccacgacgggaagtaatgttacccatgatatcaccaaggtattcttctgggataacaacctctacagccatcataggctcaaggattacaggatcacatttcttagcagcattacgtaatgccattgaagcagccactttgaaggccatttcattggaatcgacgtcatggtaagatccgtcgtaaagttttgctttgatgtcaatcagtgggtagcctgcaagtacaccattatctagtgcgccttcaagacctgcttgtacagctgggatgtattcacgtggaacaaccccaccaacgattgcattttcaaattcaaatcctttaccttcttcgtttggtccgaattcaatccaaacgtgaccatattgtccacgtccaccagattgacgtacgaatttaccttcaacttgagcagatttacggaatgtttcacgataagaaacttgtggatcaccaacgttagcttcaacgcggaattcacgtctcatacggtcaacaaggatgtcaaggtgaagttcacccataccggagataagagtttggccagtttcttggtcagtttcagcacggaaagttggatcttcttccgctagtttcgcaagagcttgccccattttatcttggtcagctttcgatttaggttcgatagcgacttggataactggttctgggaattccatggattctaagataatttgttctttttcatcacataaagtgtccccagtagttgtatctttaagtcctacggcagcagcgatgtcaccagcgtatacgatcgaaatctcttcacggtgattagcgtgcatttgaaggatacgtccaacacgttcacgtttacctttagtcgagttttgtacatatgaaccggaattcaaagtaccggaataaacacggaagaaagttaagcgtccaacataagggtcagtcataactttgaatgctagggaagagaatggttctgaatcatcagcgtgacgagcagcttcttctccatcaggcaatacgccgttaatagctggaacatctgttggtgctggaaggtaatcaagtactgcatctaacattggttgaacacctttgtttttgaatgctgtaccacaaactacaggatagaactcaacgttaagtgttcctttacggataccagctttaagctcttcttttgtaatttcttcgccttctaggtatttcatcattagctcttcgtcaagttcagcaactgcttccactaatttaccgcggtattcgtctgctaagtctttcagatcagctggaatttctttaatatgaggatcatttcctaaatcatcttcgtaatacaacgcgttcatttcgattaagtcaatgataccttcaaatgtatcttcggccccgattgggagttggattgggtgcgcgttggcagccaaacgttcatgcaaagtacctacagaatataggaagtctgcgccgattttgtccattttgttgacgaatactacacgaggaaccccgtaagtagtagcttgacgccaaactgtttctgtttgtggttctacaccagattgtgcatctagaaccgcaacagcaccatcaagtacacgaagcgaacgttcaacttcaactgtgaagtctacgtgtcctggtgtatcgataatgtttactcggtagcctttccattgagctgttgtcgcagcagaagtgatagtaataccacgttcttgctcttgctccatccagtccatttgagaagcaccttcatgggtttcaccaattttgtgaatacgccctgtatagaaaaggatacgttcagtagtggtagttttacccgcatcaatgtgggccatgataccaatattacgagtcttttctaaggagaactctctagccatgttgtatttctccttccataaaacaatttttcaggcaatacgcctggaatttgtcagtgatttttttaccaacgatagtgagcgaacgctctgttagcatcagccattttgtgtgtatcttcgcgtttcttaacagaagcaccagtattattggcagcatccatgatttcgcgagcaacacgtacttccattgttttctctccacgaaggcgagcataatttactaaccaacgaagaccaagagtagaacgacggtcagcacgtacttcgataggtacttgatagttagcaccacctacacggcgagctttaacttcaagaagaggcataatgttcttcatagcttgttcaaatacttccatcggatctttaccagtttcttgtgcaatgatatcgaatgcggaatataggatagcttgagactttccacgttttccgtcaaccatcattttattaattaaacgagttactagtttcgaattataaatcggatctggtaacacgtcacgtttagcaacaggacctttacgaggcatcggatatcctcctttcatattttataagtattattttttaggttttttcgtaccgtatttagaacggctttgtcctctattttcaacaccagctgtatcaagcgctccacgaacgatatgataacgtacccctggtaaatcttttacacgtccaccacgaataagaacaacactatgttcttgtaagttgtgaccaataccaggaatgtaagctgttacttcaataccattactcaaacgtacacgggcatatttacgaagcgccgagttaggttttttaggagtcatggtaccaacacgagtacatacgccacgtttttgaggagagttaacgtctgttaattctcttttaaaactgtttaggcccttgttcaaagcaggtgatgtagattttttaattttagattgacgaggtttgcgtactaattggttaattgtaggcatgggataaattcctccttccttatttagtagttccacacatccaggtggttcattttttcggtaaaataaaatggctgtaagttcgacctacaacgctgttttattttcagacctctgtttatagtagaggcaccttgaatatagtaacaccttgaggtttagatgtcaaggtgttacttgaaatttagttaattaactaagtccattcaaacgttgatataaatctttcgcgtagctgtcggtcatgccgcaaatgaagtctgttacgagaagtaatcgcaagtaaagtttcattgtttcgctttcgccttctgcgtttttgcggtaacagcctaggtagttgtcggaaatcaaggttagtaggcgtttatctttggctgtttggcgttctggggtttcgctgtcgtagtagatgacagctgggatgaacgtttcgagcaatttggagatgatttcgttgccggcgatttcggattcaacaatgcctttatcttggtaaatgtacgtgaatgataggctttgtaaaatttgtacgagttgttcggcgcttgaagcatcgatgagcgagtcgttgaatgtgcctgccatgatggcgtcgtagttctcgtaaaacacttcgagtgagcgattgattagttggccgcggacattcgatgctagccattgttgtacgatgaaactttcttcttgtccttcgtaacgctcgctttttttcttgagttcgttatagcacgcggcagtgactttattgtgctcttctacttcttcaaaaccttttaagatttgcgtgatgttgacgatgccttttttcacaccgtcttctaggtcggcatttaggtacgcgatatcgtctgccacttctagtaaataagtgagcggatgacggttatcaagtgcttctgttgcagttgttatttcattaaaaagagattcatcggcgtaaaaatagcctagttttttacttttgatttgttttttatttacttttaaagaagaaactgggtatttgataaccgcatttaaagtggcaaatgttaggtttaatccgtactggtcgaaaagataatgcagtttggaaactacacgaagcacttgcgcgttaccttcaaagtaataaaagtcttctttcatttgcggtgttaggatttctgcaaggcttttatttttgtaagtgattgttgctaaattatcgcggaaccactcacggatactttcctcaccaaaatgaccgaacggcggattccccatatcatgtaaaagtcctgcacaagcaaggatttccggaattttttccgcatgatcttttgtgaaatcttggtctaagttttcttcttggatcgtgtgtgtaaccatgttccccattgattttgcaatcgtacttacttccattgaatgggttagtcgtgtacgaacaaaatcgcttttttctagtggaaatacttgggttttatcttgtaaacggcgaaacgatgcactcataacgatacgctgaaaatcattttcgaaagcgctacgtacgtcggtgtttttcgagcgagtgacaccagattcgcggcgacgtttatcatttaatagtttatcccatttcatttaaatcccatcctttataggttgcttagtttttccatttcggctttagtgagcctatgtacggtccattctgacattttctctgcgccaattttttcgtaaaaatccatgcctgatttattttcatttaggcaccaccactcaaatctaccgcaatctcgtgctagggcaagtttggataaataactgaaaaactgtgttccaaagcctttacctcgcatttctggaatgatgtacaggtcttctaggtataagccttttttgccaagtaatgtggaaaaattatggaaaaagagtgcgaaaccaactggcgcgtcttcgtattcagcaataattacttcagctgatttttcttgaaaaagggctttgtgtaagccagattctgttgctactacatctttttcaatcccttcatgcgttgcaagttctgtaataaaacgaagaattaacttcgtatcttgttctgtaccgtttcgaaatgttagttgtgtcatgtatctcttccttttcgttgtcgtattaatttaagtataagctagagtgcgggatgtatcaattaaaaaaatatctactatataatataaaaaaactaggcgctttttgggcaacctagtttttttgggtgttttatttttttaagccttggatgcatgctgctttatctgttgctccaaagaaatatgatccagcaacgaggatatctacgcccgcttgcttacatttttctgctgtttcggcatttacgccaccgtctacttcgataacatagctaccgtgattttttcggcgccaattatctagatagcgcatatttttgatggtagaatcaatgaaagcttgtccaccaaaacctggatttacggtcatttgtaaaactaaatctacatctgctaaaacggcatccagcacgctcgccggagttcctggattaagcacgactcccgctttacaacccgctgctttaatttgttgaatgacgcggtggatgtgcggtgcggcttcgatgtgcacggaaataatgtgtgcaccagctgcggcaaatttttcaatatagttttctgggttcgagagcattaagtggacatccagtggaatagttgctgttttgccaatttgttccaccatatcaattccaaacgtcagattcggcacaaaatgtccgtccatgacatcgatatgaaggtagtcagctccggcatcttctgcttctttaatggagtttgccatattcatataatcagctgcaagtaaagatggcgctacgaatgtcatacgcgcacaccggctttcgcaattacagcttcgacgcgatccgccacattttcaggagtgaagccgtaagcgttaaacaaatctttcgctggagcagatgcgccaaaatgatcaattcctagcatgtcaccttctgatccaatgaattctttccaaccaaatgttgctccggcttcaatcgcaaatctcgctgtgacttcttttggtaaaatactttctttatacgcatcggttgttttttcgaagcgttcccagctggataaactgacaacggaaacgtcgatatcttttttcgcgagttcggctttcgcttcgattgccagggacacttcggaccctgttgcgataatgattgcgtctggtttggaactatttgctggagctacgatatatgcacctttttcgatccctgcatctacttcttcttggtcgttttcgagtaccggtaagtcttgacgtgataatacaagtgcaatcgggccgtttgtgttagttgcagcgatttcccaagcagcgcgcgtttctttggcatcagctggtcggataacggttagacctggcatggcacgaagcgaggctaattgttcgattggttcatgtgtcgggccgtcttcaccaacagcgatactgtcatgcgtgaatacatatgttactggaagttgcattaaagcagccatccgcattgctgggcggacatagtctgagaagacgaagaaagtcgagccaaatactcgtaagccgctatgaagtgccattccgtttaacattgctcccatcgcaaactcgcgcacgccgaaccaaatatttttaccagctgggtcttgaatgctatacgctgggctcgcatcaataaatgttttattcgagcaacctaagtcagcagacccaccgaaaagttccggtaattcggctgcaatcgcgttgatcatttttccagaagcagagcgcgttgcgacatttgtgcctgcttcaaaagttggcaaattagcattccaatcagctgctacttctcccgctagcactcgatctaattgtctcgcaagttctgggaattcttttttgtaattagcaagcatcgtgttccaagcgccttctagtttttctccgcgcgctttgtaatttcttaaataatcacgaacttcagccggtactgtgaaaggctcttctgcccattcataatgttctttcgcgccattagcttctttttcaccaagcggagcaccgtgacttgcggagctacctgcttttgttggcgcaccgtaaccaatgactgttttcacttcgattagtgttggttttgatgtttctaatttagcttgaacaattttttcttgaatagctgctaagttgttgccatcttctacgcgcaaaacttgccatccgtatgcacggaaacggtctgctgcattttcactgaatgttgcacttaaatcaccatctaaacaaatatcgtttgaatcgtatagtacgattaattttccaagtcctaaatgtcctgcaagtgaggctgtttctgatgccacaccttccatcaaatcgccatcaccgcaaatcgcatacgtgtaatggtcgacaattgggtagtttggttggttatattctgccgccaaatgagactctgcaagtgccattccagctgccataccaatcccttgtccaagcggtccactcgttgcatcaactcctgcagtccatccgaattcaggatgtcctggtgtcaaactatctaactgacggaactgttttaagtcctccattttcacatcataaccaaataaatgaagcatgctataaagtagcgcggacccgtgccctgctgataagacgaatcggtcgcggttaaaccattctgggttggctgggttaaatactaaatgtttcgcaaatagcatatacgccattggtgctgctcccatcggcattcccgggtgtcctgaatttgctttctcaatcatatcaattgataacgaacgaatcgtatctactgcttgtctatctaatgtttttttcaaaacggtcatctcccttaaattctttgtgctttattacacatgtttttctacattggaccaaatgtgcactaatctttctgcataactcgttttatctcggtcatgaaaaagtgccgatgttcccagtacataaatatctggtaaacagtctcgcatcaagccaactgtttctttattaatattgccatccacttcgatgagcggcgcatggatttttccagctagttttgcttttaaatcatgcaatttctgcaatacatctgtttgaaatttctgccccgcaaaacctggatttacggtcatcattaacaccatttccacatcatctaaatacggataaatggcttcaatcggggtttccggatttatcgcaattgatggtttgacgttgtaagagcggattttccggatgatttctgacacgtcttccgctacttctacatgaaaagaaatatattccggtttcaccgggccaaacatgtcaatatatttaagtggggtaatagtagccaaatgtatgtctagagggatttctgtattgtttcgcactatttccaaatattctggaccgagtgcaagattattcacatatacaccgtccatcacatcgcagtgtagtagttccacgccagcagattcgaggcgctggagctcatcacctaaatgtagttggtctgcacacataattgaagcggctatcttcctcattttcatcctcactttctttcgagttcagtaattttatccaagcggcgtttatggcgatcacctgcaaaagatgcctcaagccacgtatcaacaagtaaaagcgctagtccttcaccgatgacgcgttcaccaagacagagaatattgctattattatgttccctagtagcacgcgctgagaaagtatccgaaacaaccgcagcacggattccatcgactttattcgcagcgatactcataccaattccagttccacagcataagattccgagttcagattgcccacttactacttgattggcaacttcttctgcatacgacggaaaatcaacactttcgtccgtatatgttccaatatcaacgacctcgatatctttttcacgtaaatgtttcacaatggcatcttttagtcgacgtccgccgtggtcacaaccaattgttaatttcatttaatttcaccttcattaatagatttttttcttttaacgtcttataatgaaatggaaccgagaacatacgcgaatatgttctcggctcatttctaaggatgactactgtaaaacatctgagcccgagaagctttggattcgtttgcacggttatcctttttttgatgttttttcatacagcccatcctccattattaagatttcactaatactttaatttcattacctgccataactgcctcgaaagcctcgcgccagtcatctaaaccatatactttggtaatcattttatctgtatcgattttgccattagcaagtaagtcgagtgctaaaatccaagaagatggtttttgagaacggctgccaatataagcaatttcacgttggataatagattcttcatcaatcgcatttttcttttcggcaaaaagtcctacttgaacaaaatcgccttttttcttcgttagaggtaatccttgatttacagctggtactgcgcctgagcaatcaaatacgcgttccgctccgtaaccccctgtcatgccgagcacaacttcagccaagtcttcttttaaggtatcgacaatccggtccattccaagttcttttgctagacgtaagcggtcgctatctttggtaattcctgccataatcaccgttgccccttgcgctttcacaacttgagctagtaataatccaattggccccggtccgaaaacaagtactgtgtcatctggacgaattgttgttttttcaagcgccgaatgcacgcaacatgcaagtggttctgtcagtgctgctgcttcgagcgaaatacgttcatctagcacgtggcaactttcctcgcgagataaaacaaattctgcaaaactaccatttgcttgcgtaccaatgccgcgacgattgctacataaattgtaatcatgttctttacaataaatacactctccacaagtttcaaaagttgtttcacttgtgacacggtctcccactttgatactcgttacatctggcccaacttctacaacgacaccagaaaattcatgtccaagtgtgacgggagttgttggatttttgtattctcctttaaacgtatggatatctgatccgcaaataccagtgaatgctactttgatttttactttgtcgccatagacttgtggttcttccacatcttttagctccatttgatcatatccgggatttgtttttactactgctttcaaattaatcgtcacctttctgcggcaatatcatcactttgttataatcatgctctcttgaaagaatcatatcaaaagcttctttcgtttcctctagcttataacgatgcgaaattagtggtttcagtttaattcgaccttgtttcacgaattcaatcgacgtacgccattcctcacctggaaatggtgccgagtaagaattccaaaaacctttaagcgttaattcgcgtctgaaaatattttcaaaagcttcttcgtgtaaaagtacatctgcgtaagctattcctagaaaaccaactttaccttttttcttcgttacaagtaagcattgttcttgggttatttttgaaccagcacactcgagcgcgatatcggctccaaggccatttgtataagcaaaaacgcgttcttttaagtcttcattttttggattaatggtgtatttacaaccgaattcccgcgcgtctgctaattttttatcactaatgtcaaccgcgataatatctttcactcccgcaagaagtaagcattgtacaaccaagattccaatcgtgccaattccgaagacaatgaccgtatcgccaagtctcggctgaataccaagtaccccatgcatcgatacagcaagtggctcaatcatcgcaccttcctcaaaatcaaggtcgccgatagaaatgacattgtcggctttcatgacaacattttctgcaaatcccccgtggaaatgtgaccccaccatccggtagttatcacatagcgcaaaatcgcctgctttacaataattacattccatacaaggctcaagtggaatccctgcaacccggtcacccatagctacatttgttacttcactaccaatttccgtaatcacacctgcgaattcatgtcccattacagcaggcaatgggtatttccagcgagtctgcattttatgaatatctgatccacatattccgactgcttttacttcaacacgaacttgatctttcccgcaagtcgcttcatcaatttgttctgcttttattacattattctcgtataacacagctgctctcatgttactatcacctcttctatatcattaagacaaaacttagaaaatagctgcccaagcttgagagaatttaagaataacccagttaaagaagttaccacccatatcaagtgtactaacttgtgttgctcctttagggaattcgtaaacacctttcatcatttctgtatgaacaagaccgaagtcagttgccataagaagcgctagtgcaataactacagttccagctaaaacggaatgaagaatgttacctttacgagatgctactacgaatgatacgtagaatggaatagttgccaagtcaccaaaaggaagtactttgttaccaggaatgataacagctaagaaaagagtgattggaacaaggattaaaccagtagaaatattcgctgggtgaccgatagaaagtgctgcatcaagaccgatataaagttcgcggcctttgaaacgagatttcatgaactcacgagcggattctgaaattggaattaaaccttccattaaaattttaaccatacgaggcattaagaacattaccgcacccatggacataccaagttgtgcaactgccccaacgtcatagcctgcaagaataccgattgcaatacctagaataagacccatcatcattggttccccgaaaataccaaaacgtttttgaatagtttctgggtcaacgtggatgtttttaataccagggattttagcgattagccaaccaaccggaataccgatgaaaccgaatgctgctgtagaacctgttggtaaggagatcccttttaagccgtaaaattcttctaccataggttgtgttctatctgccatccaaagaacagcaacttcatagataatggcacaaagaatcgcgaaccaccagttaccaccagttacgatataaccagttgcacctgctgcgatgaaatgccaatagttccaaatatcaatatcgagtgttttcgtaactttgaagaaaataagtgctaagttaactaccaaacagattggaattaaaattgctgcaactggagaagcccatgaagccgcggctgctgctggccaacctgcatcaataattgttaaattcagtccaaaacgctcaaccatttgttgcgctgccggacctaagttactagatagtaaactaataacaaggttaatacctacaaacccgataccaatcgtaatcgctgaacgaagcgctttctttgctggtactcggaaaattaatgcaataaagaaaatcataataggcaaaataactgtaggccccaagtttaaaacatactgtactcctgacagaagtgtatccatttaatatttcctccttttttctctgtttaatgatgatttttaaactcccttgcgcagccttttatttaaggtgcgcaagtatttcttcgtctaattcttccatacccataccagtgatataagaagttgcaataattgctgggattttgtaagttgttggtaagatagttgttgatacgattaagtctgctccgtcttgcatggatgctgcttctgaaattttaatttgttttacttctgcatccacgttgttttcttttaccaaacgttctactctgtccgttactactgttgatgttgcaattcctgctccacaagctaccaaaattttaaattgtcccatgataaattcctcctaattaattgctgcgatttcccgcggctaattttcctgtttttttaaacggctattgtttctaaaatttgttttacttcgtcttcatctttcgctctgagtaatgcggctacattgtctttatcttgaatcgtccccatcaattgctgaagtaccgcgagctggctgtgaggttcatttagtccgagtacgaaaatcaaattcgcttcaaccgtttgaccagcatcttccattaatttaaatggaatgccatctttcacagtgattacggcgataaattgttccgtaacgcattctggatccgtgtgcggtaatgccacgccgtatccatctaattttagccccgttggaaaggtttgttcacggtctgttagtctcgttaaaaagtcatccgtaacatacccttcagacttcccactttctgcgaccatttggaataggtcctcttgtttctcgatatccgattgaacccaaaccattccttttttcaaaaattgtactaaatccattacgaaatcctcctgtaattctttctgacttctctacattgtcttttttgtttccaagtccgtgaagtttttaattatttggtgcatttcttctgtgttcgcagcatccgcaagttttttcagttcttttttgttctccgataattccatcaattgtagtaaagctgtgaagtgagcatttttatctatagctgcaatgacaacgataaaatgtagttctttaccgccttcaagtggcaggccttcttctagataaagcaagctcattccgaggctatttactcctttttccgtttcagcatgagggatagctatcgtattacggagaatgatgttcataatcggtgctggatattgccgtttcatttcttccacataggctggttccaccactcccgctgaaagtaacggtaaagctgcatgataaattgcttcatgccaatctttcactgatttcttacgtgtgattcgcgttacttcaagcaaatctgcgagtgagcttttgccttcgtgtttagatgtattttcttctggaactggcattaaatagtctgctagcactttttcaagacgggcagcatctttaatatcagcaaatttggaaattgttttcattaattgatcgacgcttatattcacctcatccactaagtaaaccgaccgcatcacccggcgtctaagctccaggcgctctttcccatccatcaattggttgataaggaaaaatttcttgtcggtcgaaagtggcactgcggaaaatacaatgtcataacctaactttgtttgttcaaattctcgaatcgacatcgcttgatagaaaaatatttccgggaaaaggcttcgtaatgttttttccatcaatctcgaaatcgacaatccgttcggacaaaccacaactgcttttagtctcgtttgtaatttctctgtggattcgattaaatgccctccaatgaaaagggtaataaatatactttcattttcaggaactttgctaccaataaaacgttctaatggtgctaacgactctttcacgatgtaatgcacggcttggaattcttgatcaattttgtctaaaatgctgtaatctgttgtaagatgatacttaattcgataatacgcaggtttaatgtgtgcaaataatttttcaagtaacgattctttgtctactagttgaatacaagcctttttctcaaattcacttagaacttgttccagtgccagccttaacttgtgcgtttcctccgattttaaatattgtttcggaagtacattggaagttaaaagttgcaaggtgatgtacattcgctccgcttctggcatattcggctcttcttcaataaaaatctctgctgctccgtattcccgagtatctgacaattcattgtagtcaatcaggaaagatgtcgtaattgtttgccccttcttcatccgccgaaaaacagcttctaaaatgtaaggcagtatttgcattttattgtcaataaaatgcaaattcaggtgatgctcaacttgttccaatttttcccgaagctctttaattctcgcttcgtccacttgcatgaaatcctgtaaatactcttcgccgccaaaactttctatgatgtgttctgccgcataaatgagtgccgtccgctggttccactcatctccatcaattaaatagccacgcattcgtgaatattttacttcgaggttgaatttatcgagtgtcttttgtaccagcttcaagtctcgtaatacggtgttcttgctcacctccagctcgcttataaagtgattaagggataactcttcacttcctgttgttaacatgaggatgattagactggcgcgctccttttctgacgggatgtaccaatctgttttttcgccatcttcctcaccaatgatttgaaacaggtcaggttctacgataaatcgaccatttgcagctcgatgaatcttcggataagtctgttcttctagccagttgttaattttttggaaactatagtcgacttgtcttcgagttaaaccaaattttgcttgtaagttcgtactcgatgtgtcaggatgtcgtaagagttcttttaaaagtgaattacttctctcatccaaatacatatcgttccctcctgttcgttttaattataaatctaaatctaataaaaatgtacacgctttcatcccaataacttgcggaaagaatgtacatcattgggctttacttgtgacttttttaacaatcctgttatttccaaatatgtgaaagttgcttgtaaagcttgtttatagcgtgattgtgaaacttcatgaaggtaggtaaaatctgctttgaaacaaaaatgagaatgaagtaacggagttttgcggggcgttgtttcttcttaatcatacaaaagataggctgttctttctacacgttttgtaaaaaataacgcaaaaaaaggcgcaaatgataaaaaataccattcgcgccataatcagtttctctattttcttttcagtttatccacccgaagcaaacttttgttgagattcttaaagggtgctgcgcgtttcactttcattttcgggaacgattttaacattcgtcgttcattaaatttaagtttgcgcatgctggcagcaagttctttgtcttgtttacgttttgcttctatttcagcaattttcatatcaacattttcttgtttcttcaaaagtccttcttcaaattctttcgcccgttcttttacgcttgcttttagttcatttgcttgtgcgtttagtttttcattaaattcggcaagtgctttttggaatgatagcatacttgtgacagatttaatcgtatcaataagcatcagaaccacgatgagcgcaggaataatccagccaccccagcttaaaatccaatccgcaaattcggtgacaagtgggtgcaagaagcgtacaacgataatacaagcaaatccccaaaaaatcgaaatcggcaagcaaattcgaccttttacattgagtggccagttgtgataatcccaccatgttgtatggaataatgcttctaaaatcgttgcggtaacatattcaatcaccgtacaaataatcatcgaaaaaataaataaggcccataagttattttgaaacggtaaaatcatcattaaaactgccgttaccccaaacccgtaaatggggcaatatggtccatacagaaaaccacgatacactaacttcttctctgaaatcgagcaaaaaacttcctcccaagcccatccaagaacagaataaatgaagaagtataggataaacatattaatatccatcttttcatctcctttttgttttctttttcacaatcaatttcattataacagaaataagaacttcttaactaaattagtcaaaaagttctgcttgtttatattttggcaacttattcttcgcttctgagtacgcatgctgaattaatgcgcgaatcaagtctttatctcgttcttcttccaataaaacagaaatccaaactcgtttattcatataataaccgggaacgatggctggattttctgcgcgaagttgctcacttttttcggcatcgcacttcaaggttaaaatgggatgcccatctttattcgttccgcgcattgccattagctgatccaagacatgatagcgctccgctccccattcttctttaaaagaatactggactcctttaagaccactgatttcctcccgtatccaagcaaattcatcgctcattgtgcgggctccaaaatcataatcttattgccatctgggtcaagtaaattcagttcacgtccgccccactcagccacacaaggttctggtgtctccactcccgctgtttgaagttcccggtacatctcatccaaattagtatcacacgagaaaacaaactccactttagattcgcttgcttcgccccatttgctattattccaaacaataatcccgggagccttttcagaaaaacctaatttcgctccgtcataattgtcgtacccttcgaatactatcggaattcccaatttttcgtgataaaacgcaaccaacgccgccggatcttgtgtggaaatatttgtacaaacaaattcattaatcattttaagcacctccatatcattagtttaacaaagcatttacgtttttcattgtatatttgcgacattttgcagaaaaatttgcttcatttcttctggggtatgattactatatcgtttaaattgtttaattaagtgagcctggtccgtaaacccatgaagataagcaagttcagcgcccggcacacttggattctcatataatgcctgtaatactttttggaaacgaataagttttgctgtctgtttaggtgcaagtcccatgtgtttttgaaacagccgttctaactgccgaacagatacagctcctaacacaaattgattggggttttgtagtaacttatcaatactgtttaaaaaatcaggatggacttgcttgccaagcatcattaattttcgcagtaaaaattcttctaataaagctattctttcactgttcgtcgtcatttcagcaaacctctcttgaaaaaacgaaacaaatccagcaaacatctcttccggctcttttacccgattcatgctaccagtcaagtcctgttcgacaaataaaaataacgaccacgcataaaatcgcacggcaaaaagctcggtattactttcatcgtcagactcaaacgatgcatcactaacgccaacaaatatagcatccgtcactagccctgttttactatcaattgtaaaaataatatccgcacataaatcaggaaccactaaattatttcccgggaaattcttatcatctgcctcccaaaaacagcgaatatagcctgtaagagctgcactcggtagatattctttatagccagcacgctttggtgtagctacaatgggataaaacgtttctagcttagccataaagagacccccttttcctcatagtaccacaaaattttctctttaatcatgcttctttcttttatttatgggtattaagtaaataaggggaaaacttttgagagggtgatacaaaatgtctgcttacaaacggattcttgttggtgtagatggatcaaatgaagcggaagccgcgctaagacgagctgttcaatttgccaaaatggatggcgctacgcttggcattggctttgtcgcggatgttcgtcggattgcaccattaatcgattatgaacaaacctatgccaaaaaagccaaagcttacggagaagaattagttgagatgtacaaaaaagaagccgaaaaagctggcgtagcgcacgttgaaacttttgttcactttggtacgccaaaaactaccttcaataaaaaaataacgcgaaattttgaacccgatttaattttagttggagcaactggactttcggcaacagaacaatttattcttggtagtgtttctgaatatacggccacccatgcaccttgcgacgttattattgttcacgcaaaaccttggcgcaacagaaagactgtcgaaaaactctaattcatgtataatgaaggtattgattatacggcaggaggagaaaaaatgacagttagtaaagttgccattgcttcagaccatggcggaattgaattacgaaaaagtattatttcttatcttgaaagtgttggtattagttatgaggaatttggccccgaaacaccagaatcagtggactacccgagactcgctattaccgttagtgaaaaagttgttaaccaagaagttgaccgcggcattttagtttgtggtacaggcattggtatgagtattgcagctaataaagtaaaaggtattcgttgcgcgcttgttggtgatacatttagcgctcatgcaacgcgtgaacataatgatacaaatgtccttgcgcttggagcgagagtcataggtccagggctagcagaagacattgtcaaaatttggttagaaacagagtatgaaggtggccgtcacgcaaatcgcgtaggacaaatcactgcttacgaagatagccacgcttaaaaaattataacgaccaagtctccttataggcttggtcgttttttatcttcattttattaaactttcacaaatagtaatttattcccgtttctatatcacaaatgagaacatttacgcattgctaataagaacatttgttcgtataatgtatataagcaatagctaatcatttgaaatattggaggtgtcatcatatgagctaccaagatcgcggcatgaagaaatggggcggttttttactgagtgagcataccgaggctatgcagaacgctgagccaactttagtatggaaggaagctatgactacagaatttatcgagagcgtactagctagcgcgatgacacatcagtctatgcttgttatccaaaaaaaaccactaggtccagaagcatctcccgaaaacgatattattggtcgtatttcaggagtggaaaataataccatttatattaagaactctgaaggtattatccctctttccttctctgctattcgtaatgtagaggaaaggagcgtcgaaaaatggtacaagtagaagattatagccgtgcgccacgtcgtgatattttgtgcatcgatattaaatcgttttttcgcctcggttgagtgtgtcaaacgtcggctgaatccacttgaagcttatttagtagtaatgagtaacgccgaacgagctggtggccttgttttagccgccactcctaaaatgaaacaagaacaccacatcaaaactggttcaagaatgtatgagcttcccacctgggacaagcgaattattatcgctcctccacgaatgaaactatatttaaaagtaaatgcgatgatccaagccattttcagacgttatgttcccgctgagtttattcacgtttatagtattgatgaatgttttttagatgtgactgggtcgcatttgctgtttggaagtaccgaggaaattgttcgtaaaatccagcgtgacattttagaagagctgcgcctctatgtcacagttggaatcggcgacaacccccttcttgccaaactcgcgctcgataatgttgccaaaaatcgcgatgatgggatagctgaatggcgctacgagcatgttcccgaaaccatttggaagattaggcatttggatgacgtgtgcggaattggacgtcggactgctgttcgcctgcaaaaaatgggaatcttcaatatgtatcaactaagccaaacgccgccacaagtattgaaaaacgtaatgggtgtagtcggtgagcaactttattatcatgctcacggaatcgattatagccttttaaacgaaaaatatgtgcctgttagtaaaagctacggaaaaagccaaattcttgaaaaagactatcacgtacccgcggaagtagaaattgttattcgcgaaatggtcgaggaagtagcaatgcgtttgcgccaaaatcatgtggatactgctgttattcacctaagtgttggctacagtaaatacagcataaaaaaaggattcagccatcaagctaaaatccctcctactagtagtagtcatgcgcttattccttatttcctgcaactatttagacgttacgatgaacgcgaacccgtacgctccattgctatttcatgcggtaagattactttaaaaaccggactacagctcaatttatttgaagattttacccaaactttaaatcatgagcaattagaaataactgtcgacaaaatccgttcgcgctatggttttaaatcacttatgcatgcaagcagtttgttaaatggagcgactggcttaaaacgttctgaaatggttggcggtcataaaggttaatttattctggttttacgcggaataagaagtcttgcaccatcgtcgtgaagattttcggttgttcaatttgtaaattatgacctgcaaaatcaagaatagcaatcgatgcatgtgggtatttttcgagcaacgtgagtccgtctgcataacccacgtgatcatcttgacgaccaaataagaataatgcaggtacatcgaattgcactttttcgtctggatcaaagctcagctcatagttcgcagataatcggtctaaaaattctccatctgcattaatcattccagccatcacttctgccaagaaacgattccagtttcttgctgttaaaatgacgccactttttgaaaagtatgctcggtctccttttgatagtgactggacaaaggtatcgtcttggtacatgactttttgttcgggtagcgttcttctttctttttcagggtaaatgactggacaaataagcaagactccgagtactctatctggcattttcgccgcgattccgcgagttaaatagccaccatacgattctccagcgagtacaaattgctcgcccggaattaccgcttcaataaattctagtaaaagcgtgagtacatggtcagcattttgaattgagtcgtaattctcggtttttcccattccaggcaaatccaaatatatgcgtgagaacgagctttccttatcaaagactggctccatacaaccaatcatcagctgcgaatcaggagcaaagccatgaatcattattatcggtattccttcaccatatttttcataataaacgtctacgctacggattgttttatgcatattaattcctcctggcgtttatttttatcataacatattattattcttctgccatccggtatccaaccccaacttctgtcaaaatgtatgcaggttctgccggatttttttcaattttacgtcggatgttactcatattgactcgaagcgcttgattttcacttggataaggcccccaaatttctcgaataataaagtcatgtgtaaggacttttccagcgtggcgagctaacaggagtaaaattttatattcaatcggcgtaaaatggatttccgtatcgtccattttgacaagtcggcggtcgtcatcaatatacaggtcttgaatgcgaataatatggtcatttggcgattctttactgcttggctgaatgtgtcgtagcgctgttcgaatacgcgcgaggagttccgatgtgccgaatggtttcgtaatataatcatctgcgccaagatcaagcgcagttactttttcccgttcgtgatcccgcgcggatacaacaataatcggcacttttgaccaaacacgaatatcccgaagcacgtctagtccttccatatctggcaaaccaaggtcaagcaacactacatccggcgaatggctagccgtctgttctagcgcttcttttccattcactgctttaattaccgagtaatcgctcgccgtcaaaacagccgaaataaaattactgatgccatcttcatcttccacaattagcacaagccgcttgctgttcattttccatctcctccgtctagtggcaaagtgaaccagaatgtcgccccaccatgtttgttattttttgcttccaaagttccgtcgtgtgcccgaataatcgacatacaaatcgataagccaagccccaagccacgggacatgtctgagcgttctcttgcctctaccgcaaaagtatcaaataaatctgccaaacgattttccggaattccttttccattatcgcgtacactgaaaatcgcactttgtttcgttttcgtcacgtctacccaaacttctgcaccagttccaccgtgacgtagcgcattttccattaaattaataagcacttgctcaatcagtgtcccatccatcggaaccatcaaaagatcacgcggaactttcacgtgaatagttcggtctctgaaacgtttttttatgcgcccaaccgcctcaccaacaatttcttctacggcttccggcgctcgttccaagctcaccagaccttcactaattcgtgtcacagatagcaaattctcgaccatccggatgagccagcctgaatcatctttaatacctctaattaagtttcgctcggtttctttgtctaattcatcttctttttcaagtaaggcggaactcgcgccaatgatgcctgtaagcggcgttcgcaaatcgtgtgaaatcgccctcagcagattacttctcatcttttctttggctgattcaataacgatttggcgctgttcttctgataaatattggcgctctaaagctagtgcgacttgagagctaatcatccgtaaaaatatccggttatcttgtgtgagcggaccttcttccggggagcaagaaaccccgatgacaccaagcacttttccttgtgacatcaccggcatatagtaaccaaacgctcccattagcgtatccgtcccagcgcccgctcgttttttgtttttaaatacccagtgggcaacagcttcttcatccgcactaagaagcgcgctcgcatcttcttttccttctgcttgtacgaaaatcccttcattacttttggcaggatcagcagaataaaaaataacggaacggctaaataaatgcaaaatatattcattggtaagattaataattccttttaaattgcgcgttaccaaaagctgtttattgatttcataaagcacttcggttcgacgttctcgctcaacagcaaggctggcttgtgttttgattcgaacagttagtgcactcgtaatcaatgcaaccaaaagcataatcccaaaagtcaccggataccctgcctgaattgtgttaaatgtataaagcggcgacgtgaagaaaaaattgaataacatgacgccaatgatagaacctaggacaccgtacacataaccgcttgttacgcgagaaataattaaaacagacaaaatatacaccataatcacattttggtcgccaatgccaaattcacttaagccaacacaaatcgctgttgctagcgctaataataacaccattttcgccatgtcatgccatgtgaggaaacttttaaaccgcattttcattcgccgtttttttgcttttggatggcttgaagggatgatgtgcatatcgacgttatccaaatgcgtgataagtcggtcttcaaaatcttcctcaaatagggaacgtaaccccatacgccgacgtgacttaccaacaacaatatttgtcacaccggtcaaacgagcgtactcagctactgtttccgcaatatcatgcccagcgagggtaacaatctcagcaccaagtcgttcagcgagttccatcgtttcccgtaaacattttttctctgctttggtcatataatcattttcttcattttcaatgtaaagagcagtccacggagcgcggaaagcctcggctgtgcgtgctgtccagcgaatgagttttgctgacgaaggcgatgtcccaatacaaacgagccatttactacttgcacgtttttctggataaacaccagtttggtcgtattcatggctaattcggtcggccgcttttcgcatcgcaatttcacgtaagagttttaagttttctctagtgaagaagttctgcatagctgtttgcgcgcgttctggttgatagattttgccttgttcgagccgtttcaaaagctcatctggctcaatatcaattagttttactcggtccgcttcatcaaaaacatagtcaggaatcgtttcgcgcacagcgaccttggtgataccttcgacgatatcattcaagctttcgatatgctgcacattaacggttgtgtatacatcgattcccgcttggagtagttcttccacatcttggaaacgcttcttgtttcttacgcccgctgcattcgtatgtgcaagttcgtctaccagaatcaattccggcttccgtttcaacgcttcgtccaaatcgaattctttgagcgcaatatttttatggttgattgctttaggtgaaataatcgggattccttctagcattctcagtgtttccacgcgggcatggggttcaatataacccgccacgacatccacacctgctgctaattggtctttagcgtcacttaacatggcatacgtttttccaacacctgccgcaaaaccaaaatatatttttaatttccccacagatgaatctgtttcttcttgcaaattcaccagtagcgcatccggacttggacgattcgtttccataaactcgcctccaacttacattttcaatctatctaatgccaaattcacttgtaagacatttacagttggctcaccccaaaaacctaacaatcggttacttgtatgttctgcgataatttctttgacttctttggtggaaatgcctcgttctctagaaatccggtctacttgatatgccgcagcagcctctgaaatatccggatctacgccacttgctgatgctgttacgagatccattgggataacgcggttgttcgtcggatctagtttatgccaccaagcgattcgtttttctactaattgtttttgttcttcgctagtagggtttaagtttgtcgccaccccgtcacttgcagcccgtccaatcaagtactcaggctcagtaaacgtttggccaatttcagcagaaccaacttttccggtcgtaccatctgctagcttttcttctattatactgccatttgctttgtcgtggaaagctacacctgcaaaaacagtgacaacacctggataaagcacgccacacaccaatgtcaaaagtagaaatccaattactgccggcttccaaatttgcatgaatcttttcatgttttctccccctcttaaacgattcctagaacagttaatagcatatcaatcaatttaatcgcgataaatggagcaatcaacccccccagaccataaatcaacatatttcggctcagtaattttccagcaggcatttcacgatatttcacaccttttaaagaaagcggaataagaacaatgataatcaccgcattgtaaataatcgcggataaaatggcgctcgtcgggcttgttaatcccattaaattaagcgcttcaagctgtggaaaaataccgtaaaataacaccggaataatcgcaaagtattttgctaagtcgttagcaacactaaaagtcgtcagtgccccacgtgtcattagcagttgtttgccaatccgaacaatatcaattaatttagtaggactagaatccagatcaaccatattcccagcttcttttgcagcttgtgttcctgtattcatcgcaaccgccacatccgcttgcgcaagagctggcgcatcattcgttccgtctcctgtcatcgccactaaatggccttcccgttgatattcacgaattaattccaattttgcttctggggttgcttctgctagaaaatcatcgactcctgcttctgccgcaattgctgctgcggtcattggattatcgccagtaatcataattgttttaatacccatttttcgtaaatcgagaaaacgttcttttacaccatttttcacgatatcttttaaataaatgacgcccagcacttgattgttacgaacaacgacaagcggtgtaccaccagctccagcaactttactcacaatcgcatcacactctttggggtacgtcccaccattcgccgttacatatgcacgaaccgcatccgccgcgccttttcgaatcgtattttcttgataatcaattccactcattcgcgttgttgccgtgaaaggaacgaattctgcgtgcatttcagcaaaatctcgaccacgaatatcaaagcgttctttcgccaacacaacaatactgcgaccttccgccgtttcatccgcaatcgaagaaagttgcgccgcatctgctagctcttgttccgtcacaccatccactggcaaaaattcgcttgctttccggtttcccagtgtaatcgtcccagttttatcgagcaaaagcacatccacatcgccagctgcctcaatcgcacgaccactcatcgctaaaacattcgcttgatttaaccgactcatccctgcaattccaatcgacgaaagtagtgcaccaatcgtagttggcgccaaacaaacgagcaaagcaatcacattcgtaatcgaaattgccgatccagcacccgcctgcttactcgcaaattcagtaaatggtaaaagtgtcgctgaaaccgccagaaaaataatcgaaagcgttacaagcaaaatttgtagagcaatctcgttcggtgtctttttccgtgaagcaccttccaccatcgcaatcattttatctaagaaactttctccagagaccgccgttacacgaacaaccagccaatcggaaacaagtgtagttccacccgtcacggcacttctatccccgccagactctcgaattactggtgcagattccccagttatcgcactttcatcaaccgaagccgcaccttcaatgacctcgccatccatcggtatttgttcattcgcaaggacatacacaatatcgccttttttcaagtcattcgaagcaacttcaatcacatcagttttatcatcaacattctttaattttcgagctaaaacgtcttttcgagccattttcaaactatccgcctgtgctcgaccacgaccttccgcaatcgcctcagcaaaattcgcaaataacactgtaaaccataaaatcagcgcaattgctagcgtataaccagacttctcatccgaaatcccgaagaaaccgagaaaataaaggctcgttgccaaaatcgcaccaacataaacaagcaacatcaccggatttttcacttgcagttttggagacagttttttcgtcgactgaatcagcgcatctttccaaatacctttttccatcatttccattcacctcatttgaaagttgtaaagaagtccgcaatcggtccaagcgcaagtgctggcaagaaactaagcgcgccaacaagtaccacaacaccaattaaaagaccaataaacatgccatttttcgtcgataacgtcccgctgctcgctgcaactgaactctttccagccatattttgagctaagtaaagcgctgcaacaagtggaataaaacgagcaagtaacatcattactgcgccaaccatatttgtaaacgtcgtgtctgccgcaaatccagcaaaagcactaccattattatttcccatcgaagtaaatgcatagagcacctcagaaaagccgtgcgccccactcgccgaaacagaagcttgcacacttggcatcatcaccgcaaccgccgtaccgaataaagtcaaaagtggcggaaccaagataagcaaacaaaccattttcatatcataaggttcaattttcttccctaaatattccggcgtccgcccaaccaaaagccccgcaataaacaccgtcaaaataataaagccaatcatgccataaagcccgctaccaacaccgccaaaaataacctcaccgagttgcataaagaacatcggcaccagtcccccaagcggagtcaaactgtcgtgcattgcgttcaccgctccattcgaggctgccgttgtggaagccgcaaaaagcgacgaaccaccaacaccaaatcgaacctcttttccttccatactgccagaagtcgcaacaccttgataacttggacccgcaaattgttcggagatagttatcgcaacaacaccaataacgaaaacaatcatcatcgctgtcataatcgcgcggccttgcttactatccttcaccgcacgcccaaacatcacaacaagcgccactggaataagtaaaatcgccaacatttctattaaattagtaaaactagatggattttcaaacggaaacgcagagttcgctccgaaaaagccgccgccatttgtaccaagctgtttaatagcaatttggctcgctgctgggcctaacggaatcaactgcttcgccccattttcaagtgtttcaacaaccgaataatcagcaaaggactgcaccactccttgcgaaactaaaagaagcgccaaaataagcgaaagtggtagtaaaatataaagcgtcactcgaaataaatcttgccaaaaattccccactgttttctgtttcttccatataaaaccgcgaattaccgcaaataaaactgcaatccctgtcgccgccgaaacaaagttctgcaccgttaagccaatcgactgcgaaaaataagataaagccgtctcaccagaataagcttgccagttcgtattcgacacaaaactcgccgccgtattaaacgccagactaaaactaagtcctttcataccttccgggttgagcggtaaaaagccttgtagcatcaacaccgccattacaaatacaaacccaactgcactaaaagcaagtacggataccgcataacgtttcgcggacattccaacctcactcacacccatcaaccgataaccaaaccgttcaactggctctagcactcgtgacaaaaataccttttccccaatcatcactttatacatataaatcccaagtggcactgctaaaactaacaacaatacaacaaaaaacacatcctgcatcacaatatacttcataaatcctcacctctaaacaacacataaaataaatataccaacaaagctaaaccgatgattccagcaattactagaacaacacccattttccgttcaccccttcaccgtactctttccaccactaatcctaccaacaaacgtataaagacagtgttaagattctaaagacccgcataaagattccgttaatatcgcaatgtgtgtaaaatttacacacaaaaaaagccaatgtgtaagcaaaaaacaaaatgaaaacccttttatagccacatttaaagttggcacggtacttgcatatataaataagtgttaagagaattatctagaggaggaaataatcatgaaaacaatcatgttagtatgttcagcaggtatgtctaccagcttactagttacaaaaatggaaaaagcagctgaagcacaaggtattgaagcaaaaatcttcgcagttgccgaagcagaagcagctaaccatttagatgaaattgatgttttattacttggaccacaagtacgtttcttagaaggaaacatgaagaaaaaattagagccaaaaggtattccattagctgttattaacagtgttgattatggaatgatgaaaggcgacaaagttttagaacaagcattagagttaatgaagtaaaagagggtaattacagctaactagctgaaaattataaaaaactaaagaggtatagtaataacgctatgttttagaaattatgtattcgtcttaacccggctattactctatccctcaaaaaaggagaataaaaaatgaatggttttatcgcatttatggagaaatatttcattccctacgctgccaaaattggtggacaacgtcatttagtagcaattcgtgatggtttcatcacaactatgccactaatgattctagggtctttcgctgttttaattaacaacttcccaattccagcttaccaaaaattcatgaataatttatttggtgaaggaacttggcaagcattcggcggaaatgtttggaacggtacttttgctatcttagcattacttatcgctttcactgtagcttacaacttagctaaatcttatgacaaagatccactttcttccgcagtagtttctgtagcaactttcttcactatcggcgcaattgctccaggtgcagacggtattgcaaacactggtggtcttggatcaactggtcttttcttagctttaattatcgctattctttccactgaaatcttcactcgtttaagtggtagcccgaaattaattatcaacatgcctgatggtgttccaccggcagtttctcgttcattcgcagctttattccctgcaatgatcactgtttcaatctttggtcttatcactgcgttcttccaagcagctggtgtgactaacttagtaatttctttctacgaattagtacaagaaccgttcatgggtcttgcaaactccttgccagcagctttattattggcattcgtttctgctttcctttggttctttggtttacacggtgcgaacattatcgacccgttcatgcaaacaatcaacatcccagctatcgaagctaacgtaaaagctctagaagctggtaaagaacttccttacatcgttaacaaacctttctttgactctttcgttaacttaggcggaactggggcaactatcggtttaatcattgctatctttatcgtagctcgtaaacataaagcgtacatgacagtttctaaattgtctgcagcgcctggtattttcaacattaacgaaccaatgatgtttggtcttccaatcgtcttgaatccaattatgttcattccgtacatcttggcaccacttgtacttgtaactgtagcttactttgcaacagctattggttgggtaccagcttgtactatcgtaactccttggactacaccaccaattatcggtggcgcacttgcaacacaaagtatcgcaggtggcgtacttgcagctgtaaacttaggtttatctatcctaatcttccttccattcgcgaaaatcgctcaaatccaagagctacgtcgtgaaaaagaagctcttgctgctgaaggcgttactgctgaataatttttaaaaaccaaaactttaaggacgtgtttacagatggatttagagcaaactattatgagcttgatcgtgttcggtggtaacgctaaaagcgatgctatgttagccattgattccgctaaaaaaggggatttcgctcaagcagacgaacaaatcgcccaagcagaacaagcactacttgaagcgcatcattctcaaacaaaacttatacaaggtgaagcacgtggcgaaaaaacagaagtttcccttctactcgttcacgcacaagaccacttaatgaatgcaattactttcaaagatttagcgaaagaaattgttgacctttataagaataaataacacttaaaaaaccagttgtcgtcatgacagctggtttttttcttctgttaaattagccttaaccttatagtcatagtactatttatcactattttttttgatttatttttaagtatcttagttagaagtcatttccgttgtgagagttcctctttgccatatttattgaatgaattaatctattactctcgagaaatattatacttctttaacatatataatatttacatcaattttaagaataaatttataaccacatttgataatttaaaaagcccccaagagttagatttttagctctaacttttgggggtcttttatattaaacattatttttttgataaacgaaactttttataaatcttaaatcctataaaaacgataccaataactaaaacagcttctaatacaattggtatataaggcgctatccaagacatgcttttgcctccctttatttaaaacttgtagttaactttttcccgcttactgatgcttttaacgtaacattccagttagaaatcttatttttacaatcaaatacataactagcgcttgaaccagagctagtttttgaaagtttagattttttcacatcaagtcctggactataaaattgataccatggattataagcacttgtaattttacctttacccttactaacattaatcttagcattaaacgaacaattatatacaccactataccagtatattttccatgtacttgttccatttgctagcgaataagttccttttaaaagaggcctttcgtcaatgattggcattacacctaaagttccttctgtcccgtcttccaaaacaatttctttctcttgagctatattcccatttaaatcaaatgtttctacttccgcttcttgaatattgtctggattctctatttcggaagcgctagcattgattacacctactcctattgtcataataaaagtaaatacagcaaaaaataaaaattccttcatttcattctctcatctagttgtgtttcgtttcacaaagattatatcatataattgttaccgattaaacacatagctcaatcggtaacaatttcactaatatatgagtaaacaggccttttgattcctctgaatataacaaagaactcggaaattattcagacgacttatttttcttctattaaatcggcatctgaccgaataatcgctagcacaacgcctaccgcaataaaattaccaagcacagcactcccaccataactaatgaatggaagcggaatccccgtgagcggcataagtccaacagtcataccaatattttcaaaaatattaaatgcaaaactaactgcaaagcccgctaaaacaagcgaagaaaaagtattcttcatcaatagcgctgccataattaattgatggataagtaccataaataaaattaacaacaaacttacaccaacaaacccaaactgatgcccaatcgtactaaaaatcatatctgtatgactttcaggaatatacgcatttgttcctgaactaccagtcatcatccccgaaccaacagctttcattgacaaattgagctggtacactgcatcaggatctgtcgttggatcaagccacgtctgaatccgagaaaactggtacgcgtgaaaaccaattttctctaataagctaatgtgatacacgacaacatacatcccaactgttgcagctgttaagattaacgtaataattccgaccatcagttttgtcgatttaattgccagtaaaataatcgctagcgccgtaaccccgtaaacaatcgtcgtaccaaggtctggttgtttcataattaatagtaatactatcccagtaagcaccgtcagaatccctaattgtttccatttttgcgcttgatatttcactgcaaaatgcgccaatacaaagataaatatggattttactacttcagaaggttgaaaagatagcccagcgaagcgataccaacgagtcgccccatttatattttgaactaacggattaggaatgagtatacctaggagcgtaatgaccataatcacatacaaccaaatcgcatgatggcgcaaaaactccaccggaagcctagaaacaccaaaacacgtaagcgtcccaattgctaaaaacaccaattgcattcctaaaaaattcgtattgtactgatttgtctgctgcgcataatagattgccacacaactaactaaagacaataagaacaccgataaaataatccggttataaagtacatctcgtttcataaatacacgacctctctcgttttagctagtacgttccgtctcgccgccgccagtacaaatcctactgcacatgaaagcatgacgaccgaactaccaccataactaataaatggcaacggtacaccagtaagcggaataatcccactcactccaccgagattcaaaaacatctgcaccgacacccaagatgcaacaccgatacaaaccatcgaatcaaaaataaaatgactactaatagcaatgtagagtgctgtaaaacttagcgccatcagcaaaaatatcgtccaaataacaccaaaaacaccaagttcctctgcaattaccgtcataataaaatccgtatgcggctccggcaaatagcctaacttctggatactgcctcccaagccatttccaaatatcccaccgctcccaatcgcataatagccatttctaagttgataagaagcatctaaattatccaggttaaacggatccagaaaagcaaatctacccaattttgctgaactaaaaaagtctgggtgaaagaagtaaatcagcattgctacaagtaataagagaccgaaagaccaaatagctactcgcacaaggcgtgtgaggccaactccgctcgttaaaaacaaagcgaccccaataacacctaaaatcagtgcagtgcccagatccggctgcaagaagacaagccccactgttaaaaataaaaatccaagcaaccaatattgtacgcgaacaccacaacctttttttaaaaagaccgttgcgattactagtatcaaaagcaatttaaccatctcagtaggttggaacgtcacacccgcaatagacagccatctttgcgcattgttcgccgcacttcctgtaagaagcactaacagcagtaagccaagcaaacttccagccaaaatccgaagcgttcgtctcaggtaaaatagttgcacattaatgcgcgagcaaacgagtaatcctaaaaaaccaagcccataaaaaagtaattgcctatgaaagaaataactcggctccactttatatcgcataacagcaacaccataactcgtgctataaacaagtagcaaactccatatcgccagaagtaaatacgttacaaatagtacgcgtccagcacgcatttaaatccactcccggaatttccgaatgtatatagttttcaccagttgcatcgtagccatatatccaaccaaaatcaatatcaaccaagggaaataactaccaggcaagctgacaaaaccaatgctgtggccgaatcctgtaaatggaataataatcccaagcgccatcacactaagcgttgcaatcatgacaggtgcagctgctcggctttgaatgaacggtattttctctgtacgaatcatgtgtacgactaatgtttgcgtaagtaagccaaccacgaaccagccactgtggaataatgcttgctccgccaccgtattcgcgctaaatacaaaccacataattagaaacgtcgcaatatcaaagatcgaacttaccgggccaatgcacagaataaagcgcaacattcctttttgttcccattgatgcggctttttcaaaaacgaacggtccattttgtcccaaggaagtgttaattgggagaaatcatacaataaattttgcagtaaaaggtgtaacgatagcattggtaaaaacggaataaacgcactcgccaccaaaacactaaacacattaccaaagttagagctggccgtcattttcaagtattttaaaatattaccgaatacattccggccttccatcaccgcatcatttaagaccgttaagcttttctcaagtaagatgactgagctagcgtctttcgtaatatctgctgctgtatcaaccgaaattccaacatctgctttcctaagagctggagcatcattaattccgtcaccgaggaatccaaccgtatgccccgcttttttaagcaaaccaatgattcgtgatttttgcattggggttaatttagcaaaaatgtgatattttcgcagttcgcgcgtaagttcttcatcggaaagctcttctatatccgcacctagtaaaaatccgttcgctggaatgccgacttcctgacaaatccgcttcgtaacaatttcgttatcacccgtcaaaacttttacgttaatttggtttttaaaaagatgagcaattgcttctttcgtcgatgcttttactggatcgcggaaacctaggaaccccgcaataatcatttgttcttcgtcggtcttagtaaatgcttctccgacttttccagttttataggccacagcaatcacgcggattcctgaacgattcatttctgcacacatgtcttgaagttcgctcttttctgattcagatagtgtcgaaacagcaccaccaaattccttatgagtgcatacagtgagcatttcttccaccgcgccttttgtaatcatccttgtttctgccctattttcgaccaccacgctcaaacggcgtcgatcaaaattgaatggaatctcgccaacttttttccaacctgatgcagtactctcatctaatttagcaataacagcatgatctaaaacatttttccaaccagtttggaagtaactatttaaataagccattttcaagacgcgctctgaggtttcgccagcactatcaatgtattttataagttctagtttatcttcagtgagtgtcccagttttatccgtacacaaaatgtccattgcaccaatattttgaatggcgctcagttctttcatgattacttttttcttcgacatattgattgcaccttttgccaagttcgtgctgacaatcataggtagcatctcaggtgtgaggccaaccgcaatcgctactgcatatagaaatgcttctaaccaattgcccttcataagcccgttaatcataaatacaatcggcaccatcaccatcataaaataaaatagtaatttcgaaattgatttaacacctttatcaaaactagtatcgcctcggcgttcagtagctgcgatggacaatgaaccaaagaatgtcgagcttccagtccgtaaaacaactgcccggccatgcccacttaacacatctgtccccataaataataggttttcccgttcaaaaatttctggatcggcacgtttgtcttccacaaatttttcagcaggaatcgattctcctgtgagcgccgattgattaattaataaatccgtagccgaaataactcgcgcatctgctggaataatatctcccgccgaaatttcaattaaatctccaggtacgattgcgtcttgcatcaccagatccatggagccatttcgaataacattgactctatttttcaccatattttttaacgcgtaactcgcccgttctgctctacttgtttgaataaatccaagtatcccgctcgcaagtatcattagtgccataatcacagtcgcttccatgtcgtccgtcaaatacgaaacaaccattaacatcgctaaaatatagataaacggatcattaaacgcccgaataaagagccgcaaatttgatactttcttttcttccacagtttgattgggaccaaattccgctaatctttctgtaacttctacgtttgtgagccccgtttccataacacctaacttttccaaaactttttccttgcccatttgtgattctttgagcaaattattaccttgcttttttacgtgtagttttttcattttccttgcctccaattctttctaggcaagctgagaataacgtttatgtgcgccagagatgaaggttagtcactcttgcagcttgattactataatacgagtccggttcttctacttcctctccctgatggtggtccattgccttcatctcctttcgaattttatctaagcttaattatctgaaaaaaagattttaattcccagataattattttcataataaacatgaaaaaaagtccttaccaaaaccttggcaaggacttctgagtttatacgcatactaaaacagactcccctcgctaaagttttggcactatgcaacgtaaagaatactcttagccacattatggaaagccttaatccgacaatccctgttctacccattggcgtctttggacatttttgggcagtggcctgtgtttgcataggagcctcacctaacaggcaaaactacatatttattatcgctctaatcgtctacgagtttaacatagaaaatctaagcccgcaagacaaaatgtaaaatacttaacttttatttaacttttcatgatttatttcaataattttaacaaaacatctgctaatgaatctgcggttgttgtaatcgttggcgggcgcttataaatatcatcgcgtactttttccaccataataagcaaaataacactatttaaaatcaaagaaatcgcatctgcttcttgcgcagagttcttactcggaaccatttcttttactttttcattaacccgctcatacaaatattccacaatcgacggatcaatgaattccatatctttgctgcccatttcccgaacagaaatcaccataaagtcccgatatttttcataaatatccgaaataaattgactcgcttgacgtagaaacaccttagcactctcaaaatctttatcaaaaaattgattgatttcggccttcatactttcaaattggacttccagcgtcatatgaatgagattgtctttactcttaaattttttaaaaatcgtagcttcattaattccagcggcttctgctaattgtcttgttgtggagcctttgatgccgtgtttcgccatcatacaaagtgttgcatccatgatggattcgtttgtgatcattattttacccccgttcaactaagtaagcacttgcttatattcagtataacaaatactagcctttttgacaatttaattacaatttgtcgatatcaatcataagtaatgttaagtatgtaataatggatgtagaatatttaaagaattggaagtgacttaccatgcaaaaaacgagaaaagaacgaatccttgaagccttacaagaagaaaagaaaaacaaaaaaagcaaaaaatttaaaacgggtgcaacaattgctggggttactgcaatcgcaacctctatcactgttcccggaatcgaagtaatcgttagcgcagacgaaacagcgcctgctgacgaagcatctaaaagtgcagaagctaacacaactaaagaagcatcagcaacggccactcctgaaaacacagcaaaacaaaccgttggacctcagcaaactgaaacaaaagaacaaacaaaaacaccagaagaaaagcaagctgcaacaaaccaagtagaaaaagctccggccgaacccgcaacagttagcaatcctgacaatgcaacaagctcttctacaccagctacatacaacctattacaaaaatcagcactccgttcgggagcaactgttcaaagctttatccaaacaatccaagcctcttcttcccaaattgcagcagaaaatgacctgtacgcatctgtcatgatcgcccaagccattttagaaagcgcctatggaacgagcgaattaggctctgctcctaactataacctttttgggatcaagggagcttacaacggccaatcctacacaaaacaaacactagaagatgatggtaaaggaaactactacacaatcacagctaaattcagaaaatatccctcttaccaccaatccttagaagattacgcacaagtcattcgaaaaggccccagctggaacccaaattactactcaaaagcttggaaaagcaacactacttcttacaaagatgcaacgaaagccttaactggaacatacgcaacagacacagcctatgcaactaaattaaatgacttgattagccgctataatttaacacagtatgacagtggcaaaacaactggcggaaattccggaagcactggtaattctagcaacactggaaacacaaatacctccaacgctaaaatttacacagttgtaaaaggggactcactttggagaatcgctaataaccataaagtaaccgtcgcgaacctaaaagcttggaataatcttaaatctgatttcatttacccagggcaaaaacttaaagtaagtgctggttccactacatcggatacgaatacatcgaaaccgagcacaggaacaagcacgtccaaaccaagtacaggcactagcacaaacgctaaagtttacacagttgtaaaaggggactcgctttggagaatcgctaataacaacaaagtaactatcgcgaacctaaaagcttggaacaacctgaaatccgatttcatttatccagggcaaaaacttaaagtaagtgctggatctacttctaacacaaatacgtctaaaccgagcacgaacacgaatacatccaaaccaagcactaacactaacacgaacgctaaagtttatacggtagcaaaaggtgactcactttggagaatcgctaacaacaacaaagtgactatcgctaacctaaaagcttggaacaacttaaaatccgattttatttatccaggccaaaagcttaaagttagtgccggatctactacaaacacaaatacagcaaaaccaagcacaaataatccaagtaattccacagtaaaaacatacactgtcaaaaaaggcgactctttatgggccatttctagacaatataaaacaactgtagataatattaaagcttggaacaagttaacaagcaacatgattcatgttggtcagaaattaacaattaagtgaatgtaaaaagcctacctcgtgagcgagataggtcagaaactgcggataaagcgagaaattgctttgtctgcggtttttttattaaattaaacagattataatgacaatctgaatagcagagtctattggttataattcatctatctcgcatcgatagtttaaagcatctaattcccattatagataaagaaaaagcaggtagcccttatcgcatacctgctttcccactatctgttctaaaaatgatggaaactctcaactggcattacaaacacggttgcgccgccgacttgtacttcgattggataaggcacatacgtatctaccgtcacacctaaggaagcggatggtgtcatcatttgttcgcgtgctttacagttttccttgattatcgctagggcatcttctacacgttcatcttctgtcccgatgataaacgtggtgtttcctgcttttaaaaatccacccgttgtagctaacttggtcgcaccgaaattgcctttagttagtgcgtcagacaaacggttgctatcttgatcttgaactatcgcaaatatgagtttcaaagaaatcaacccttcctaaaaatctatcttttttctattatagcaaataaatgccattttaaagagcgatatgcacttgtagcaaggtgttgaagtcacatcagatgttaggctaattgtcgtaaaatgtcggctaaaatagtttctgtgatttcttctggtgtctttgtagcatccactcgcataaaacgttccgggaacatgttgatgactttttcgtagccagcttggactttttcgtggtaggtaatatcttctttatccaagcgattgacttcacggcccttattagcggcgattcttgctaaaccgacttcggcaggcacatcgagataatacgtccggtcaggcaatgtatcctcaatcgcatataaattcacttgtaaaacttgttccatattcatgtcacgtccggcaccttgatacgcaagagagctatccatgaaacggtcacaaagtaccgatttccctgccgctagagctggacggattgtttcaacgacatgttgacggcgcgctcccgcaataagtagtacttctgtttttgggtccatttcttcattgccaattccgagcacgatatttcttactttttctgaaatcgggctgccacctggttcgcgcgttttaataaaatcgatgccagcttccgtcattttttgattaagtagtgttcctactgttgttttaccagagccatctgggccttcgagtgtaataaaaattgctttcatttagtaatttcctttccctttcgtgtcgctttctgtttgattatagcataaattagcggaatacacggatgtaattctcggctagtttttcgccgccttggtagtggcgtgtgcgaatgttttttagttcgcggatatgcttttcggtgatgccttctccgcggatgattgcgggaattcccggcggatagagcgagattgtttcagccgaaacgcgtgtcgtagcttcatctagtaatacgaattcggtcgcgcgtgcgtgcatttcttcataagttaaagcaagacctgacgcgcaaggtgtcgacatttcgtacggctctttcgcgatttcttttttcatcggtgaatgaatccggctgattggcgtgaaatcaattccttttttgattaatggtaaaatcagtaacacttgcgactcgtcggcaagctctgggaaataagaactttcttcaaaaatggcttgcagttcgtaccccgtgtagcctgttttgcgcacgatgattttaagtggatcatctggcaaaatgacttcaaatttattcttcgttagccatttaatccatctggcacgcattttccaaaaagcttcgacgtctgccgctgtgtaagttgccacatatttcctcgccgcatctagtgacgccataattaaataagacgggctgctcgtttggaatacttgcagataataagctagtttttcaaaaatcggtaaatcattaacgacatgtaaataggatcccatcgttagcgccggcaacgtcttatgcgccgactgaacaaccacatccgcaccaagctccactgcacttttcggaaattcagaacttgttaaaaaatgggctccgtgcgcttcatcaacaaatacaaccgcgccaaaatcatgcgcaattcgaatacatttttgcaagttaaaagtcgttccgtagtagctcggataagtgaaaatacatagttttacatctgggtgattatgtaatgtttcttcgagaagttcggttgtcacaccactcgcgacgccaacttctttatttgtcgctggggttaagaaaatcggttctccgcctgccagttcgataccatgcaagattgatttatgcgcatctcttggcactaaaactttctccccacgctttaaagttgccataataaccgccacgtttcctccgcttgttccgttgactagaaaatagctttttttacttccataacattccgcaagtaactcttctgcttccaaaatcacatcttcagggtggtgcaaatcgtccattccagtaatttctgttacatcccatttcaataatttttgccatgcatctggataaattgctccacttttgtgtccaggaacatggagtgatattgggcaagacttagcatgagcatctaaccgttccactaaaggcattttagattgatttctcataacaattccccttttcaaattctctccttcattgtaccattttgctggatttatgacacattcttgcagttttaaagcgttttcattttataagttgtataataaagacagcaaccacgttttgactttctagtaaagggaaattgaggtaagaggactattataaaggaggttttttgtcagatgaagaagattcttaacggtactgatcaagtagtagaacagatggtggaaggtttagttaaatcgcatgctgatgttgttcaccgtgtcgaaggaactcgcgtcattgcaagaaatgataaacgtccaggaaaagtcggacttgtaagcggtggaggttctggtcacgagccggctcatgctggttatgtgggtcgcggaatgttgtctgcggctgtgtgcggtgatgttttcacttccccaactcccgaccaaatttatgaaggtattaaagccgcagatcaaggcgctggtgtgcttttgatcgtgaaaaactataccggtgatgtgatgaattttgaaatggcggcagatttagcagatgccgatgatattaaagtagaacaaattgtagtagatgatgatattgctgttgaggatagtacttttacaacgggacgccgcggtgtagccgggacagttctcgtgcataaaattatcggggcagccgcagaagcaggcgcatctcttgatgaactgaaagcccttggtgaaaaagttattgcttctgttaaaacgcttggtgttgctctttctccttgtacagttcccgaagttggccatcccggctttgagcttggtgacgacgaaatcgaactaggtattggtatccacggtgaacctggctttacacgtgaaaaaatcatgccatctgcaagtttagcgaagcaactgtacgaacggattagcaatgaaagcaaactcctagctggcgataaagtggttgttctcgtgaacggcatgggcgcaacaccacttatggaacaatatgttttcgcaaatgatgtccatgaacttctaaaaaatgccggcgttcaagttgaaaaaacactcgttggagattatatgacttctcttgaaatggctggtttatccttaaccattttgaaattagaggatgaaaaatgggtagatatgttgaaactcccagtggacacaattgcatggtaataaaatttggaggaatgaatcatgacttatgataaagattgggcgttacgttggttaaatgacttcggcgaacgcgtacaagaaaacaaacaattactaagtgatctcgaccaagcgattggcgatggagaccatggtatcaatatggctcgcggactcggcgaactcaaaaaagctttcacagaaaaagaacccgccgatttaaaagatgtatttaaaaccgctgggatgacaatggtcagcaaagttggtggcgcatcaggtccactttacggaacagcatttctgaatatgagtaaggcagttgacgcggatacaatcgatgcggtcggccttacaaaagtcattgaagctggtctagaaggtatcgaaaaacgcggtaaatcacatgctggtgaaaaaacaatgattgatgtttgggaaccggttgttcacgcgcttcatcaagaagatttaaccgatgatgtggtggatgctgctttacaaaaaacaaaagatttaaaagctactaaaggtcgcgcaagttatcttggtgagcgttcaattggtcatcttgaccccggtgcctactcatccgctctgctatttcacgcaatgcttcaaacggaggtgagctaactcatggctaaaccttatggcgttgttatcatttcacattccaaagatgtggcaaaaggcgtccatgatattattaaagaaattgccccagacgtctctatcacgcatgccggtggaacagaagacggtcgcattggcacgagttttgatgcagtgaatgaagcaattgaaaataacgaagctaataaagtctacactttctacgacctcggaagcgccaaaatgaacatagaaacagtagaagaaatcagcgaaaaagaaatcattctctttaatgcaccaattttagaaggtgcttacgctactgctgctcaagttcaaatggatgaaaaaccagaagtcatcgcagcaaatcttaaaacaattgaaattaaataactgaaaaaaatccctttggatgcactttgtctagagggacttttttatttaatggtataattatttaaaacaatttcccattctaaaaagttaggatttgaaacgatgaatattttaattaaaatacgcgaactaaccaatttaaccaatagtgaaaaagaacttgcgaattatattttagcgaacccgaaaaaaacattacagttcaaaccaaaagaattagctactgctgcctttgtctccgctgcaactatctatcgtttaattaacaaactaggactgaacggaatcggtgaactgaaaatcgaaattgcctcgagtctccgtgaaacaagcgaagaaaaagatttaaattacgactatcctattttggaatccgatacgccttaccaaataatgaccaacctccatcaaatatataaaggaaccatcgacgaaacattaaacaacgccgatccagaagaactcgtcaaaattggcgaaaaattaattcaagcgaaaaccatcgatgtttatgcagcttccgccaatttatttttcgcacaaaatttcaaatttcaaatgcaggaaatcggcgttttagtcaatgtccctgaagaagattatatccaaagcttatcggccgccaacagcgacgaaaaccatattgccatcgttgtttcttacggcggccggagtcggacacttcaaagagtcgtcaaaatcttgtccgaaaacaatgtcgatattattttaattacatctatgcaagacaatcctttagtcgaatttgccacacacaaaatctacatggcctccgctgagaaccattacaataaagtctcttcattctcaacacggcaatcattactaagcattttcgacacgctttattccatttattttaaccagaattacgaaaaaaacattcaatacaaaacgactaattaccaaaaaatgaacactgaattggaatgatttttcaaaaacacagccattttcctttcaaattgaaaaaaagctctcaatatgcgccacatctgactttttcttaatttctagtgatacaataaagaaaaaaaggagctaaactcacatgacaacccaagcgattattttagatattgatggcactttattgaacgacgacaaacaaatctcaccagaaacaaaaaaagcactcatcaccgcgcaagagaatggtgttaaacttattctcgcatctggtagaccaaccacagggatgcacgtatacgcggaacaattagaaatggaaaagcatcacggtttgctcgtttcatacaacggcgctaaagtagttgattgcgcgaccaatgaagaattattcaaccaagcacttactgttgaagaaggaaaagccgttttagaacacatgaaacaatttgaagtgaaagtaatgattgataaagaggattatatgtatacaaatgacgtatacgactgctacgtaccttaccgcggcgaagaaataaatattattcagtacgagtctcgcggtggaaatttcaaactctgtgaaaaagatgatttagctgcatttttagattatcgtctaagtaaaatcctcactgccggtgatccggcctatatgcaaaaaaattaccaagcaatgatggcgcctttcaaagatacacttaattgtgtctttactgctgatttttacttcgaattcacagcccagggcattgataaagccaaagcacttgataccgttttaacacctatgggcattcacgctgaaaatgttatcgcatttggagatgggcataatgatattaccatggtcgaatatgcaggaacaggaatcgctatgcaaaatgccgtccctgaattaaaagccgcagcaagctccgttactttatccaacaacgaagacggcattgcgcacgtgctaaacagtttaatcccaagttaagaaaaaaggctgagattcagccttttttatgttgtataaaaatttttctccttcattctacagaaattctccattttctggtatgcttaagttaataaactaaagtaggaggtaaatgaaatgacactttctttctcggatacatacagactgaacaatggaattgaaatgcctagacatggttttggggtctacaagttaacagatgaagcgcgtatgcgtactgcgctggaaaccgcggtggatgttgggtatcgcttatttgatacggcttcattttaccataatgaaaaagaacttggagacttttttgcgtcaagcggcttgaaaagagatgaatttttcgtaacaacaaagatgtggaatacagagcaaggttacgatgaaacgcttcgggcttttgaaaaatcacagaaaaaattgcaactagatcaaattgatttatatttagttcattggccaaaacaagatacatttttcgatacttggcgtgctgtagaaaaattatatgatgaggggcttgttcgcgctatcggcgtaagcaattttgaagcacatcacttggatcgtcttcgcacaagcgcaaatgttcttccagtagttgatcagcttgaaacgcatccgcactttccgaatcatcttttacaccgctatttagaagagctacatatcgttcaccaagcttggagcccacttggccgaggtggcgttttacaagagcaaatccttattgacctagcggaaaaacacgggaaatcacctgctcaaatcgtccttcgttggcacttacaaaataatatctctatcattccaaaatcagaaacaccttcaagaattagagaaaatgcagctatttatgattttgaattatcggaagcagatatgcgtcaagtcgagcgtttaaatactggtgaacgtgtgagccacgcaccagacgtaatgtatgtaagatcagaaatttagcctaaaataaaaatctactaaaccaatttggcttagtagatttttttatttgttttttaattgtcttgtacgtgcttctttaaaaaggtaaaaatagcgcgcttcggcctttttttcctcgtattctaaattaggatcatattcaaagcttttacgcattagaactttctgtttgtgccaattttcttgtgtgacttcaatcaattccatcagataagcatcataggatttgtgtaatttgccaatcttcttgtttttcttccggccaaacttattacttctggactccattttatcacctcggtttagacttctcttcgtccttccattgcttttgaaagcgtcacttcatccgcatattctaagtctccacccactggaaggccatgcgctattctcgttacttttatgcctgaaggttttagtaaacgcgaaatatacatcgcagtggcttctccttcaacatttggatttgttgctaaaataacttcttcaatagtgtcatcttgcaaacgtttcagcaaatcaggaatattaatatcttctggtccaattccgtccattggagaaattgtgccatgaagcacgtggtataagccatgaaaatcacgcattttttccattgcaatgacatctttggattcttgtaccacacaaataacacttcgatcgcgtgacgtatcagcacaaatataacatggatccttatctgtaatgtgaccacaaacggaacaaaagcttaggtttctcttcgcatcaacaagtgcttttgcaaaatctagcacatcgtcttctttcatatctaacacataaaatgctagccgagctgccgattttggtccaattcctggtaatttcataaaactatctattaatttcgttatcggctcaggataatgcataattcgtcttcctctcaccttcaaaatacaaatgtttcacgtggaacattctattgaaaaatagttgagactcttgaatacaagccaagagtctcaaaccaagcaatattacattccagggatatttaacccttgtgtgaatttacccattgtttgtgaagttgtatcttcaatttgttttaatacgtcatttgttgctgcaagtactaaatcttgtagcatttcgatgtcttctggatcaactacttcttcgtttataacaacatccgtaatgacgcgtttaccagtagcttttactgtaaccattccgccaccagcagttccagtgaactcttgagcttctaaatcagcttgagctttcgccatttccttttgcattttttgcatttgtttcatcataccttgcatatttcccattccacgcatgaataatctcctctttcttctattgttttttaatctttaatttcaagcaaatcttcaccaacgagttttgcggcttctgcaacaaaaggatcttccgctggttttttagcttctggatttgcgccgtcctccgcatcagcatcactaccatgactatgcaggaaattctctcttacatcagcccattgatcttctgggattccaataaaagtataatttacttgtgtcagtcgtgcaatacttgatgtgatggtttcaacaaaattcggattatccatcgccatttgacagtgaatctcatgcttaaattttaacacaaaagtgtcctgagatgcagctacaggttctgcgtcatttaaaagagctgcttgagatgccatcaacatcgataataattcaccccaacaaccacgaattaattgtaaattctcttttttagcctcacctaacacatggttgattttaccaataggagctttaaattgctttccgttgttgatcgctttcttagagccgccgcgattttgggttggtttatcagctggtgctgctccggccccactggcaatttgttttttcagcgtttgtatctcttgatgcatttgctccatttgacgttttaagtcagagacgtcgcttccagaagccgcatctgctggcacattcccgccacctgcaactgattgacccgcctgagttaactgaacaagcgccacttcaacataaataccaggatgattcgaaaaacgcatttgttgttgcgctgtatttaaaatcttcacgaactcatatactttgagtgaatctgctcgctttgccaacgcaacaaaatcatcatcaattaaagccctttccattgtttcttccagattcggtgctttttggtatagcaacacatctctaaagaatacgagtaaatcttccactaagcgaactgggtctttcccttctgctagtaaagccgttagtgtggaaattgcttccgctgcgtcaccatcaaatgctgcacttactagtttggtaagtaaattttgtgcaacagatccggtaatttcgagtgcatcctccaccgtaacttcttcggatccataagaaataacttgatcaagcaaacttagcgcatctcgcatcccgccttcagccgcacgcgcaacaatcatcaacgctttttcgtcataagggattttttcttcttccaaaataaatttcaaacgaccaataatatcttgtgtcgtgattcgtttaaaatcaaaccgttgtacccgcgaaataatcgttagcggtaacttatgcggttctgttgttgccaaaataaaaatgacatgtttcggcggttcttccagcgtttttagtagcgcattaaacgctcccgtcgacaacatatgcacttcatcgataatatatactttatatttcgccacagttggcgcatattttactttttcccggatatctcgaatttcttcaaccccgttattactggcagcatcgatttcaagaacatctggtatagaaccgtccgtcgtacctttacaaatctcacattcattgcaaggctccccgtcatggccgtgttcacagttaatcgccttcgcaaaaattttcgccgcactagtcttccctgttcccctaggcccagaaaataaataagcatgcgaagttttattttgcacaatggcatttttaagcgttttcgtcacatgttcctgcccaacaacatcctgaaacgactgcggccgaaaaacccgatacaaagcctgatacgccatctgccactctccttcacctaaaaccattttagtagttttattataacgtattgttgaagaactttcaaaatgtactttattttgatttagttcttcaatataaatctgagcgcagcgatgatttaatccttcccagaactttcaaaatgtactttattttgatttagttcttcaatataaatctgagcaaagcgatgatttaatccttcccagaactttcaaaacgtccttagtcaggctagcttcaaaaaccaccaccaccaaaaaccaaaaatcaaaaccccaaaaaaagaaccagacccccgaaaaagcccgattccaacccattactgttcacttttagcagccaatttctcctgcttctgcttactttcattaataacagaaagctcaattgatttcagcaaatttttcacacgctttttccggaagaagccgaacataaaaccaacaataatattattcattttatttagcgctttttccgtttcaattaattcgttatacgtcacttcgcatgttgtttcgctagtggattttatcgtatacgtcgtcgtatgagtgttcacacgactacttgtttcgaattgataaagttcattaggttgcactttaacaatttttgttgtagcaagtgcgccattagacatcgtacgttggtatttatatccttctaatttgcgtacttgcagcgttttaccagtggcatttttgacgtcatagattgctgagctcacaagtgtatcaaagcattctttttgggatatatataatttctgtgtgacattcacttttcaatcgactccttctaattcttttctttcttatctttacggatttttagcacgatgaatacacagccaattaaaacaaccgcaagtccggtaactagaagaggtacactagccatcccatcttttccataagaaggactaaacataataataataagacctatactaataagaaatagtgcattaacaattttcattttcaacccacactaacttggaaatagagtacagaacctatttcagttgcttttatagtttctttggcgatttttgctgccttttcttcgtcttcaatatttgtttcaaaagtaagtttcatacctttttcgtctatttttttaaaagttacaccgtctttatcatatgtttcaagtaattcagtaatgtaatctcgcttcattggacaattaagaataatcatttaaaaaaacctccttttatatagtttaactttatctttcacttcttgcaatgaataaaaatggtgcaggaattcctacatgatatactggctaggcacaatttagctgtacctagccagaaacttattattttctaagctttcatctcttcttctggtacaccaacgcgatttgcggtaataacaaatggtacccaaatcaagaacgcgacgaccatatttatgagtgaaattactggtgccatccaatctcccccggttgctaagaaggaattcagaagtggcggcattacccaaactactgcaattttaactggcccgacaatgccgagtgttgttgcaaagtaagcgattgttaccattaccattggcgcgataaggaatggtattaagtaaattgtatttaatacaatcggtaaaccaaacatgattggttcgttaatattaaatatacctggtgcaagagacaatttcgcaactgttcgtgcatccgctcgtttcgagaacattagtaacgcgataatcagtacaagcgtaccgcctgaaccacccatccatacatacgcatcgaaagaaccacgtacccattcgaatggtaatttagcgccttcttgtgccgcactaatgttttgtagttgtgccgtaccccaaagtgactctagaaccggagcaagtacgttcggaccatgaatcccgaagaaccatagtaattgtactaagaaagtaactagtaaaacagctccgtagccttgcgaaagtgataatagcggttcttgaattgttttggaaatccaagtaataacgtccatatttgtgattttgaagaatgcccagtcaataataccaacaacataaagtgcaactaacgcaggaataatcgccgcgaaagctttacttacagctggtggaacagaatctggcattttgataataatatttctgcgcattaatttcgcataaataatagttgatataaaaccgaaaatcattgcggtaaacaagccggtaccatttacttggcttaggctaaagaatccgtaaattccagcaaattcttttggtaaagtagctacatcgaaatttgcattagaagccgcaatcgcagcttttactgcatctaagctaacagtaacagttaagttcataacaaaagcagcaagagaaactagccccccagctaatcgatccacttcatacgcttttgataaattataccctagtgaaaaggcaaaaataattgaaacaattgctaacgtcccattgtatacatatccattaatcccgataagtggttgcatcgcttccacaaatcctgtccatccccagtcagttggaaaatccctaaaaaacgcatttaaaagtactgcaattgacccagccatagtgattggcattgttgaaataaaagcatcacgtaatgcaactagatgtttttgtgaaccaatttttgctgctaccggcacaaaatacttttctaaaaatgctgttaatccattcatattttatcctcccatgaaccttttttatttagcgctcatctctttaaacaaaatataatttttatgtatacatccctttgagtttatcagctatatctgtttactttgtcctagcaatccccattactaaaacaaacagatggaatctttgcatgacctcgtgaaattttgggagccctcctctctgcttcatgataaggcttacatttagattcaccttaatctattgcaatttccgtgccaagtactaaatttggaaaaaatatacgttaatctcttgaaaacgttgtctttcttacctttgaaatcggattacacacatacagaaaaaaactgtgtaagtaagcgttaacattacacagttttactaatttatccattttccattttgtgttataatgagcataagataagtaataccaacgagtcgaggtgatagttatggcagtcaaacgcgatatgccggaagagtcaaaaaatagtaaagtggtcaaaaaagaacatttttcgattgtgtttcctgatgatataaaagaacccgcaaccgtggaagaaaagaagaaacaagatgctgaaaagaaaacagatgataattaatataagaaaagcacttaccaactgataatattgctttttttatgcgaaatatgatatcatataaatgaaaagagagccatgcgctaacatgactccctgagcagtagcaccgcgtaaaagacggcggctattaactaataattacacgaagtaaccatcgatcagctcgctaaagtggatcagatggttatttttttggtttgttaaagtcgagaatcatcacgacgagggtggcaaataccaccgcaaacgtcagtgcttcatacacagacacggctattcctttctaggagtaaaaccttctataaccaagaggcatcacccccgttcctggagatttagccaccatctttttcactttactactactaaatttattatagcataagaaaatgttgtaaaccaaagtcctaatgctcgaagtgaattccagtaattaaaacttttaagcaactattaagtaacatttaaattatgtcatacttttaaaaagaaattttttagagagataaatatattgctgttaagatacacttacaaatgaaaagagcatccccggggatgctcttttttatttaatagagaagataaccatttctttatcctcatcaatgcggacatttacgtccatgcctaatttatctttaaaaagtgccgtaatatttagatagtcatcgtagctaccgatatcacttttttcgtatccttgtagaattgtcggcttgatgcgcacgatgtagtcatcatttgaggtttcttccggattataagtatagatttttttgccatttttatcaaaaaagtcatacgttgcataagattcattgtttgtgatatacacatctttttgtgtaacgtaagcattatcggccacgctgtagtcaatcaaacctgagtaatatttattggtagatggttcattaatttcatattgtttataagctagtcggaataaataatcaatattataataactatttacgcggaaatagaggtttttatctttagattttttatctacgccaatatctgtcgcactaattgggaagacttcatataatttgccgtctatttcgtaagctacttcatacttatcaaacacttcttggcgttggaaaaagccaaacataattgctaagattacgataattcctacgaaaactgcaacgattaaagctggcagccatttcttttttgattttagttgttgcattattttcatcctttgtcatgaattgctttactattttatattgtaccagtttatgtagcattatacattatttttctgagaatacgagctgatttgtagaaaaaagactactctgccttaagcaaaatagtcttttatatatttaaaattagtgtcgcgcacctcacatcgacatgcaatcatctgcgttaccctgatagttagctcgggccaggcgacctcgcggcacatgagaagcactgcttaatgctgcttccttccggacctgacatggttcacaggttcccattgcgcaagacccaaccttcaacaccacttgtcaagggcagaccaaacaattacgatgcctcaaatgaggaattcaaccccgctagagcggattgcgggttacagggcgccgctacctccccgtctagcacgacaaatttgctaccaataattaaatgccaaataaaaaattatttagcgcaaactctgaaaagagctcaattactagtgtacctttttcatctaaaaagtgcaagcgggaacacggaaatattttttaacgtaagtaaacactcatgattgctgcgataatcgtaccaactacacaaatacctactaatgttaaagctatccatactatttttttattcatggtttctccccctcatcatcacttttcttttagtgattatatcatgaaatccaaaatttagctgttaatatcaaacttcttttgccaactatttaattggctgtagctagacattaactgtgtggttacctgtttgaaaatcagacgtaattccgcgtatttaaggacattctcgcttggatgatataccgctttaattggcagtgtatgttttagattaagatccttcaaaatccctagtgatcgcataccaataatcgctgctcctaaacttgagccttctatcgtatgcggaacacgtatctcacggttcaaaatatccgccagaagtttacaccaagcatcgtgcgctgaaatcccgcctgtgacataaataatatcatctggggccgaaaccgcctcataaacttctgcaagattaaaagcaacaccttccaaaatcgctcgaataaaatgggcttttgtatgattaattgtcagcccaacaaaacctcctcgaatatcattagtccaaaatggtgcacgctcgcctaacaaatatggctggaataaaagacccgcagcgcccggaggaacttcctctatttttgcaataaagcttgcgaaatcccgcctactaatttcagcttcagagccaaattgttgcaaaccccactcaactactttcccaccattattcactgcgccacctgcgataaagtatccatcaccagctccataacaaaacgtccggccacgtgaatctatttggaattggtcggtaagtttacgcactgcaccacttgttcctactgtaatcgtgacatcattttgaccagtcgcttgaataccaatattagctagcgccccgtcactacctcctataatgaatggtaaattttctgggattcccattaattcagcatattcttttttcacacccgctaattgatatgtttctggtacaactttcggtaagaaatccggggttaattttacaatttccattgcttcaaattcccagtcgtgctccataatgttatatagtccagtccccgatgctaacgattcatccatcacccaaacaccaaacaagcgatacaaaatatacgatttaatatcaacaaatttttctgtacgtttaaataaagtaggcttttcctccttcaaccaacaaattttggcaaaggggctcatagggtgtatcggcgttcctgtggcctcatacagttggaataagtaattatccctttttactttttcaagcgtctcactgcttcgtccgtccgcccaagtgatacattcagtcaaaagctctccattacttccaaccataattaaactatgcatcgcagaactaaacgaaatccccgctaactcctctgtattaatatttttcatgacagcttgaatggaagtcaaaacggcatcaaaaatttccgtggggctctcttccgctttcccagtttcatcagttattagttcataatgcgtcgcctgccggaaaatcacttctcctcgttgattaaaaagtactgcctttgtgcttgaagttccaatgtctacgcccattatgtatggtttactcgtcaaacagctcaccccgcattttcgtttctttttattatacgtcaaatagaagaaaatttggggctgggctacttagcttttttctccaaacaaaaaaaagctagagaaattctctagcttagttgataccgtaaaaagtttttattcggctttcttcacctaacacaataagtgtatttttatccgcgaattttagcacttcttttgtattggcttcactttgagcgacgcaacctaatgtgtaattgtattttggtgaatcaacatggtaaaacacagccgatcccttaccttttacacgtttagcgttgtatttcacttccattccgtatttgtactgcggaatcttcattttttcatctgcagaactagaggaattgcgctcttgccaagtattataagctttgtcattagaattagaaatccaataacttctattagtaatcgctctaaatgtcagttttgtaccagggttccccttttgtccaaaagcaatgcctgttcggtaaacgccaactggagttccagaacttttttcagagaactttggatcaaatccccatttgccgatatgactggtaaaatgacgaacttcataccaatttccagcactatttttttggaaaaagtaggttgttgcggtagtgctttttggttttgtggtgataattgcttttttgctgttccaaagtgctggaacggcgtcagcaattgttggtttaccaatatttgtaaaggcacgtgagtcaatccagccgattgtagtattccctaacttgcaatagtaccatttagctcttgctgtttttccttcgcgcgtaataatcaacgtcttcttgtcgtatttcttagctgaaccgaggtacttaacactactactcgttttgtacattttgctattaataccatcatttcgttttgactgatttactaccccttttagattaactgctttgtcataaatgattttttcgtaggatgctgcttcggcgttaaaggagtgaccaagtaggctaaccattaaaacaacaattaaaccgcttaataacttcttcattattcgctccttatttttgagttattccctatagcaattagtttattttttacgtttcctaagtaataacactgccacaagaataactataacacccgctaccacgaaaatccattctgtacctttgtcacctgtgcttggcaaatctgttttgtcgtcttttgtaacttttgtaacatcagtaggttttgttgttgcgcttttgaccgcattctttgtttcgattttcttcactttatctggagctgttacgactgcctcattttgttttttcgctgggacttgataggttacttcttcactataattacccgattcatcaaaagcatatgcagtaatttgttttggtgttgtcgcccattctgcataaaaataaccatctttatccgcagttgttgttccttctccaaagttttcatctgccggagaactcatatatacactggcgaatggttttgttttacccgtgaaaatttttgtttctaaatcaaaattcatatctgtaatagttagttgggccgttttttctttgactaagtaattgagtttgactgctgttgttttgccgtcttcattatctcccaggagcgtgacttcttggatacctgtttgtgcagtacttagtttagaattggctgctaagcgataattggttagttttgtatcggtgtaatcagttaatgttgcggtgaaatctttgagatcaatcttactattttgttcatacgagtaaacttcttgagaatcggtaatatctatcgttgtttggactttgcttttttgcggtggtgttacggtcgtgtcttttgtcggttctgctggttctgtcttttcttcagtaattatgttttcagtagtatccgttgttttttcttctgtaggcgttgagttgttaccattttcatttgtttcagcgcttgctgccaatgagaatggaatgattagacaagtcactaatgcagtgagtattagcccatggaattttttcataataaattcccctttcattttgcttagtttaatcataagcagaaatgtggtgaaagtcaattttaaattacaatattgttacaaatattaaaactacgatacaaaaaacttgctaagcatgtacttagcaagccttaattttataattcaatcgggcggtctagttgataaagtcgtttatagcgtggttcttctgccattaattcagcatgaggcccttccattaacgtttttccctcttctaaaaacaagacacggtccattttttctgcaccaactaaatgatgtgttacccatatgagcgacttatctgctaacgtttcaaaaatagtcgctagtaaatcacgttctgtaatcgggtccagaccaactgttggttcgtctaaaataacaattggtgtattttgcagtaaaattcgagctaaggcgatacggccacgctcaccacctgaaaaacgttcacccatctcactcatttgtgtatggtagccatctggcatactcatgataaaatcgtgtagttgtacttttttcgccgcctcatatacttcttcatccgatgcatcttgatttcctaggcggatgttatttaaaacagttgtactgaaaaggtgcgctttttgatttagcatggaggttaattcaggaatttgtggtcgtaatttttcaacttcaacgtcgttcatagttacttttccagcagtcggaagtagcgctccttgaactaatttaagaaaagtcgatttccctgttccactccgtccgataatcgccactttttcaccttgttgcaatgtgaagtcaaaaccgtttaagatttctggtgacttttcatcgtacgcgaaagttagattttctgcttttaaaacaacattttctgtgttgattcgctctatttctttcgtttcttcttcaaaagttggtagcgccggatcttctattttgtctaaacgagcaagcgagtcttggtataacgatttgtcactgatagcacttgaaaccggcacaaatgcttctgctagtgccattattgctaaaacgaatgcagctatcagcgtgccagaaaacgcaccatcacgtgactctgctgtgctccaataaaccatgacgatcaccataaagccaacgactaactggctaaagaaatcgcgccaattgacaaaatggaactgtttattttcagttcgaagcatatctgcctcgtctttttcgtagtttgaaataaaagttttttcacgtccgctaaatttccaatcgctaataccaaacactgcatcggtaaatttttgatatagactatttcgcccttgttttaaataagcgttctttccgcgagcatataaaagcgaaacccatggtaaaacaagcacaaggaggccaatcaaaagtacaaagagcgcagcaaatggaattgaaaatgctccaagagcgataactactccagcgtaaagcacgagactaacaattgccggcagcatcgtagttaaatagaaattttgtagatgttcaatatcaccagccaaaagaccaaggatatcgccagttttatagcgcgattttagtagtaatgcctgcggttcgagtaaacgatataagcgaacacgcattttttcgagaattctaaggacaagtgagtggctcgaaagccgttccacatagcgagaaacggagcgcataataccaaatgcacgaacgccaacagtcgaaatgtaaacagccatgatagattcaggcatcaaggacgattttgaaatcaaatgacccgatgtgaacatgagtgccccagctgatgcaaaagttagtgttccaaggaagatgacaagtaaaaacaagccgcggttttctttaatatatgggataatccagctacttttccgcatcacacttcctccaattgggctttgactaaattgtaatagaaacctttacgcgaaagtaattcttcgtgagttccagtttcgactacagccccgtgatctaaaacaataattcggtccatttcgagcatccagtgcaagcgatgcgttgcgaaaaagactaatcgatcttcaaataaatctagcattggtttttttaattcatattccgtttcaatatctaagtgcgccgttggttcatccattaacacaacaggacgatccgttaagaatgcgcgagcaagcgccacacgctgttcttgtccgccactaagcatccgcccagcttctccgacaagcgtttcataaccgtcttctaatccagctacaagtttgtttaaacctgctgattctgccgcttttttcatttcgtcttctgtagaattagggtggtaaaagcgaatatttccagcaattgtatcatggaaaaggtatggatgttgcggaatgtaagtgacttgggtttgccaatcagtcgaagcaagcgacgcaccacttttaccgttccaatgaaactctccagaagttggggtcaaaaagccactcaaaacatcaatcaaggtagatttcccagcacccgtcgcaccaataatcccaattttttcaaatccttttaccgtaaaactggctttatgaagcgaatcagcatcatctgcaccatgttttacggtaatattttcaaacgaaaactccgtattttcagcaaaagttgttaaaggtaatgcgtccatttctggcttttctgctttggcttggtcaataatcccttgaataactcgaccagcttcttgtccgtcaagtgtggcatggtaatccgagccaacctcacgaactggtaaaaagtattctggcgcaagaattaggacactgagcgcaattggcaagttcatattaccgtcaatgagaccaagacctaagaataacgcaacgagcgcaatcgatagcattgtaaagaagtcgagcgcgaaagacgacataaatgccacacgtaatgttttcattgtagctttacggtagcgtgaactaaccgaagcgattttcccttcatggtcatggcttaagcctaaatatttcaatgtttctagaccttttagcgaatctacaaagtgattagagagcactcgatacgtttcaaattgcgaatcagcttgtttttttgcggctaatcctagaataatcataaatacaattaaaattggcaaagtaatcatcaaaataaaagcagaagtccagtcttgaaaagcaatataaacccaaatcatcgctggaataatagccatattcatcattttaggtaagaacagctccaagtaatttcggaaatctgctacaccttccataaccattgtgaccactttcccagttccttccgcacgagcaaaacgtggtccaagcgcaaacaggctatcaagcaactcttcccgcatcgttttcgctagtttcgcagcatagcggtaaacgatttgttttttccatacgtttaaaaagtgacgcaagaaataggcccccgcgaagagacctatttgtattgtgactgattgaaatggatgctcgtgaaataaatcagtaattgcacgagctaaagttatcgccatcacgataatcgcagcaccttgaacaagcgtgaaaactgcgagaatcgccattatttttttaattcctttgtagttccttaaatcttttcccattaatacgtcattttctccttactagaaacgcgcttacggaaaacatagtagctccaaatttggtaaccaagaacaaacggcaatagcgtaacggcaactatcgtcatcacacttagcgagtattgtccggaagctgcattttctatagttaaatcaaacgcactgttgatagaactgatcattactcgtgggaatagcgacacgaaaatcgtagcaatcgtgaagacaattccaagtccgccgaatgtaaatgctaaaatatcacgatctttccaaataaacagggcagatagcacgtacattacgactacaattccaatcattagtggtacaagtacaggtctaacttggaacatatctgtattgaaataagcaagtacaacaaaaattactagagctggtacagtaataaaccaaacacgtttggccatacgacgagcgcgatcttgaatatcttcttctgtacgcaacgtgataaatagtaacccgtgaagtaggcacatgagcgtaatcgttacaccgccccatacggagaatactgtaatgtaatcaaagaacccagcatacatatccatatcactattaatcggcataccttgaatcaaactagcaaataatacaccaaataagaatggaggtaaaatactaccgaagaaaataacccaatcccatgtcttaatccaaagcggtgaatccttttgaccacggaattcaaaagaaacaccacggccaattagcgcaagtaataagaatactagcggaatataataaccactaaacattgttgcataccagtttgggaaagccgcgaaaatcgcgccccctgcagttagtaaccatacttcatttgcatcccagaacggtccaatcgtattaacgagtacgcggcgttccagtgcatttctagccataaatcttgtagacatcccaacaccaaagtcaaaaccttcaaggaagaagaatccaatgaataagatggcgattaatagaaaccataactcatttagtgacaaagctttcatcccccttatcaaatggatctacggaaatctctgctttttctggtttgtgtccgtctggcccttttttaatttcacgtataaacaagtaaaccaatagaatggctaaaatcgtataaattgtcgagaatgcaattatcgagaataaaatttgtcctgatgaaacgttcggcgatacggcatcagcggttttcatgtaaccgaagactacccatggttgtcgccctatttctgtcataatccaacccatggagttcgctaggaacgggaagccaatcattggaatcatgaaacgtaaataccattttgcattaacgagttttttcttccaagcaagtacgataccgattaacgcaaataaaatcattaacatacctgcgccaaccatgatacggaagctccaaaatgctgttttaactggtgggatgtagtcaccttcaccatatttttcttcatattgtttttgcagcgtattcataccttccacgctaccggttaatgttccgtaagataagaaacttagcgcgtatgggacattgacttcccattcgtttttcttctcttctgggttgattttggcaatcatcgtccacggagctgggtcggctgtatcttcccatatcccttccgttgctgccattttcattggttgtgttttaaccaaatattgtgcttgtgagtgaccactgaaagccacaccaaagccaccaattaccgccatgaccattgcaatttggaatgatcgtttaaagaaggcgacatcttgtttcttgagcatcttatacgcactgacaccagcgatgaaaaaggccccagtggcaaatgccccaaatataacgtgcgggaattccacaagtagttgtccgttagtaatgagttgcaagaagtcattcatttctgcacgtccgttcttaaattcaaaaccaaccggatgttgcataaatgagttagctgctaaaatccagaaactagacataatagttccgattgaaacaagccaaatacatgctaaatgaagttttttgccaagtttgtcccaaccaaaaatccaaagtccgataaacgtagattccataaagaatgcaagtaacgcttcgattgcaagtggtgctccgaatacgtccccaacaaatctagagtaatccgaccagttcatcccaaactggaattcttgaataataccggttacgacaccgactgcgaagttaataaggaatatgtgtccccaaaacttcgacatttttttgtaaatttctttccccttcacgacatacaacgtttccataagagcaaccataaatacaagtccaattgaaagtggtacaaataagaaatggaaaatcgttgttgatgcgaattgaaaacgggctaaaaatagtttatccacccttttctcctcctttttgtgctaaaaattactgtttcgttccctgatttgtgcttctctcttaaaaatcatgtgaaaaatcgcccaaagtgacgcgttcagttgctctgtaattcacaaagcataataaaataatatgtaatccttattttccacagatttaggaactagttaagaaagatttttactttataatgagttctatctggagtatattttatcctattttgcgacaaatttatttagtactttcgatgttattttgttttagttagattgtgataaatttcgcaattattatctggctgtaaatgttggtaaggcttattgctttttatttcacaatgaaaaatataaaagtatgatttcttacaataagcattaagacctattcgatttattccgttttcgtagttcttggaaaaaactttttaacatttcactgctttcggattccattaatcctgcttccacttcacacgtatgattaaatcgatcatcttgcagcaaattcattaacgatcccgctgttccggcttttggatccttagctccataataaaccttttcaatccgcgaaagtaaaatggcgccgctacacatcggacatggttctagcgtaacgtatagttctgcaccgctaagtcgccatgaattctgatgtttacatgcatcttgaatcgcaagcaactccgcatgggtcactgcattttggctcgtttcacgcaaattatgtgcccgaccaatgatttctccatctaaaacaacgactgcaccaattggaacttctccaatatctcgtgctttctcggcttcttcaagcgcttgttgcataaagaaagctcgttccatctatgcacctcatttctaaaaagtcactcattgttattttagcatagcttggattggatgtagcaataatctgctcaaactttcacaggaacactttagttgctttcacgaagcatttatattaccatatattaatactaggtactaaaacaaaattatcaaaatatacaatctacttataaaggagagtcattatgaattcagaaaatttaatcgctccagaactttataatattaccgacgagattgctaaattcagttctgaaaaaacagctttaatttggaaaaatgagcacggggaaacaaaaacttggagttaccaccatttgcttgaacaagcgaataaatttgccaatgttgcaaaagatgccggcataaaaaaaggcgaccacgttatcgtcatgacacctagattactcgaaacgtacgcaatttatatgggcttatggaaagctggtgccattattatcccggcatccgaactccttaaagcacacgatttagaatatcgtatccaccacgcaaacgtaaaagcaatcgtttcttacaatggaatgactgctgaatttgataaaattgaaagcatcccttctgtttcgaaaaaaattattgttggagataaattatctggatgggaacaatatgaaacattaatggaagctgctccaactgagtttgaacgtgtagaaacctctcgcgatgacgcttgtctacttgctttcacaagtggaacaacgggtaaccctaaaggtgttgtacatattcacggttggggttacgcgcatatccgtattgcggccgatcattggctagatattcacgaagacgatatcgtttgggctacagctggccccggttggcaaaaatgggtttggtctcccttcctttctgtacttggaaaaggcgcgactggcttcatttacaacggtcgtttcattccagaaaaacaactccatttactggaagaagaaaaaatcaacgtgctctgctgtacgccaacagaatatcgcttaatggcaaaggttaataatttgcgcgaacatgatttaagttcccttcgtagcgccgtatcagcaggagaacctctaaaccgcgaagtaattcaagttttccgagataattttgatattaaagttcgcgacggctacggtcaaacggaaagtacgctgttgattggaacacttgttgatacgccgattcgtcctggttcaatgggcaaaccaattatgcctgaatacatggcgattattgatgctgacggaaatccagttggtgtcggtgaaattggtgatatcgcgatgcgtagagatttcccagcacttttcaaagaatactataaagaaccagaacgtttgcaaaaagcgattcgtggtgattatttcgtttctggtgaccgcgctatccgcgatgaagataattattactggttccaagggcggaatgacgatattattatcagctctggctacacgattggcccgttcgaagtcgaggacgcgctcacacatcacccagccgtaaaagaagtcgctgttgtcgcaagtcctgacgaaatccgcggaaccgttgtaaaagcgtttatcgtcgtaaaagatggctacaagggcaccgatgatcttgtgcatgaattacaaacatttacgaaagaacaaaccgctccctataagtatccgcgccggattgagtttgttgaggcattaccgaaaactgattctggtaaaattcgtcgcgttgagttgcgtgatgcggagtttgctagtgtgcatggataatcaaaaacccagccttcctaaatagaaggttgggttttcttttaaatattcaactcactcgccgcttcctcgtccagcaccactgtaaaattagggtgtaattggaaaattgagcttggaatgtcttctgtcactgggccttgtagggcttttttgataatcgctgcttttttcttgccgtttgcgaataggatgacttcttttgcgtgcataacgctttttggtcccattgttacgtagtattctgggactttttccacgtcgccgccaacttctccgagcaaaatatcgaacatatctgggcgcgattgaacggaaacaagtcgggtttcatcgccgaatttggttacgccaggaagatttccacagaaatgaccatcttcgccaattccaattaaaatagcatccaagccacccacttccttcaaacgcgcttcatgttccacatagtttttcgtgtctaacatatgaatttgctcttcaggaattcccgctggatcaaagtacattgcttttaaattagcgatagttacgccgtatttttcgtctccaattggaatttcgtcaaaattataataactgacattcttcagtggcgctttctccttcatttcttctaccatcagttcgtacattcgcttcggtgttgagcctgctgtgattgccaaatgaacctttttgtcttgatacatttttcctaaaagcagttgcatcgttgttttactcatattttcgtaatctttttccacaataattttcatttttttcacctctcactttgaattacctttatgataaagtgtatagtaactatagagtcaagacgaaagggtgataaatgtggaaccgcttttttccattggggaaatggcaaagaaaagccaactctccattcaacgattgcgttattatgacaagattggtcttttggtacctgcttttaccgatcctacttctgggtatcgctactacaaaacggctcaagaagaacaactcaacctcattcaagcattgcaatatatgggattttccttacaagaactgaaacaatatctcgacaaaaacacaatggaaagcttacccgatttgcttattaaataccagcaaaaattaaaggatgaagaagctcgcattgctcgtaaaaagtggcttattgaccgttatcaagatttgttaaaacgggaaactgactcgacaaaacttctaacagctgcccgacttttgcttacagagccacttctaacacccgttcatgtggatattttaaacgacccagatttccatcaagaagttcagaaaaccgtgagccaccttggtctttcgaaaagctatcagcagtttcctggttattgtgtgttagacgggcagacttatcttttcattgagttagatcattctattggcgcgcctggtgaacggcgtttgttagcaagcgagcggcaagcttttgtcacgccgcaaaactggaaaacaccttcagaaaatgaaaattaccttttacaagaaacggtggcttggattaatcaagagctggttcgtggttattcctatgaaacaaaattaacttttgaatagatattttagaaagattggttataatagaaagaaataacgtggaggtgggcgccgtggaaatcaagcaaatcaaagcaaaagacacgcaagatattaggcaccgggttcttcgcccagaacaacctgaagaaaacgcaatttaccctaatgatgatatggaaggtacttttcatttaggcgcttttgaaaaggatgttttacttggggtcgccagtttttatccagaaaaatcaactgttattatgaatcctgcccagtaccgaattcgcggtgtggctacagaacgccggatgcgtctgaaaggcctcggcacagctttacttgcagaaggtgaagcggaaatatggacgcgcggcgcagatattatttggtgcaatgcgaggattgtcgctgttggtttttatgaaaaacacggttatcgcaaagttggcaaatcatttgtcattcctggcattggtgaacattacttaatgaaaaaagtgaatccaaataaaaaagtggaccaagataactaatatcttggtccatttgttttttataatttagaatatggttgcgtatgaatcatccaggaaattccgtactcatcgacgaattgtcccattttcccgccccaaaattgctcttcaaaaggtaacgtcactgtcactcttcctgagctgctcactttttcaaagaaagcatcggcgtcggctactgccgctgggtcttcactgttagaatcaagcataatcgagatttggttggatggttttacttctttgccgaatgaatctgaacaaaataaatttgcaccaagcacggtaaagccaccgtgaacagttgtgttctctaagttttcttttggtaagccaaacatttcgctttgttcctcacttactggaagccttgaaatattcgttgctccgaacacttcttcataatatcctaaagcctcttttgcattttcaaaagccaaatacgggtacatttttgccataaaaatcgctcctttgtttttgagacactagttagaaaatacccaattcgttttaccttaaactatctcgggatttttaaaaattcggcgccatgttttgctcataatcaccagacagacggcgaacgcgcctaaatctgctaatgggaaagcataccaaatgccgtctaaaccgaagaaatgcggcaaaataagtaaaagtggtactaaacagatgatttggcgcattagggagataataaatgaaatccttgctcgaccaagcgcttgatatagccctccgcagacaatttggaaaccgattgttggagcagctagaagcataaatctaacagcggttgttccttgtgcaatcagttctgggtcattagagaaaatccgtacaagtaatcctgggaaaatttctaccaagccccaagcaattagcgacatgacagttgcagctatcattgatactttgacagctttcattacccgttcaaattgtctggaaccgtagttgaagccgacgattggttgcatcccttgtgtgacaccattgattggcataatgacgaacgacgcaattcggttcgcaattccgtaaaccgcaatcgccatcgtaccaccataaatattaagcatccagtttaccgcaactgtcacgatactacctgcggacatcataataaatgacgggaacccgattgccataatccggcgaatcagcgggaaatccattcggaatgagaacccttttaaagataaagtactttttcctgataaaaagtaaatcaagagccaaatcgcgccaacagcctgtgcaataacagttgcaagggcagaaccacgaacgcccataccaaatcccataatgaaaattgggtttaaaatcatatttaaaatagcggaaataatcatggttaacatcgctgttttcgcattaccttctgagcgaacgatattattcatcgccatcgcgaaggtttggaacactgcgcctaacaaaataagcgataagaaatcactggcaatatcatgaatatccgccggtgctccaaaaagcgtaataagcggatctaaaaaaataaaggttacaattgcaataaaaatgctggaaataagtactaaccaaataacttgatggaatactttatccgcatgtttttgttccccggcaccgagcgagcgggaaataatcgacgcgccaccgataccaaacatcgctgccattgccattagtatcatttgaactgggaatgcaattgaaagtgctgcaacccctgatggcccaacgccatatgacacgaaaatcgtatcaacaatattatacattcccataacaaacatgccgataaatgccggtatcgacaatctcgccatgagtgaaggaatgctatcttcacctaatcgtttactctgttctttcattcagattctcctccttcgactgctataatcgcattatctgacagtcgtcctatcaaatgcattaagtcatctttttccttttcactaaaattcgctgttaaaagtgcggaccattcggctgtcacttcttcaattaaatcgcgcatctgaaaaccagtttccgtcacaaaaatccgctgaatacgcctatctttcgcatcaatttcgcggcgaatcatccccagttcttccaagcgcttaatgtgccttgtcacacttgctttatcaaccataaaccttttcgccatagattcttgggaaataccatcttctttataaagcgtccataaataacgtaattgacctatattaagaccagtttctagtaattttttatttttaaaagtgctttctgaacgatgaataattgcgatggctttcgctaagctttcctgtctatctgccatttatccgactcctcataaaaaaatccgccacataattagttgcggcgtcaaccattatagtatagcaggattttagttgactgcgcaacctttttatttcccgggcaataatttgacttcctatctttcttttgtaaaaataaagaatagagaaggggtgctatccactgtgcatattaaaatattaaaaaatagatatcccaatatagttgtttcaaaaaatccaataaaatccagttcagatacgatttcttttttcgaagaaccgtattattttactattcctaaaagcaatctttcagaagaagaagcgatgttattacatacgctatttccagaaccattaccaacatttcctaaagaatccacccaattttggttcgatttattgtttggaaacaaggaattggcgatgacaaatgagaaagaaacatatcgcattacgcagttccatattaagacaactacaactaaaagcatgttacaagagtggcaaaaggctttgctgagttttttcagtccagaagctgagttaattatgttttcgactaactatggcgttattattgaaaaatcaacggggtcgctgcttggcgaagaggaactaatcgccgttgccggtacgcttgaaaatgatttctatatacaatccacttttttcatgggtctttttcatccgttaaatgatcgattgcgtggcttatttgcagaagaacgtgccattttcaaccataataatcgtgaggtagttcagaccgtggcttccgaaagtttaaaagttatcgcgcttcgaatgaaagaaagtttaatcacgaatgaactcaacgaccttttccatcaagatgacacttggattccgctgattcatacgttatttaaaaaccaaggaaacatcagtctcacggctaaagagctttttatgcaccggaataccattcaatatcgtttggacaaattctatgagcaaacaaacttatcgctccgcaaaatggacgggttgctcttagcttatctatctacacttcaaacaaataatagcaatcatgaataaatgatcatggttgctttttcgcttgacttaaagttcacttcaaggaatagaatagttatagaaaatcagtaaaggagaatggtcatgaccaaaaataatatcagtttttatgtagtggatgcttctgaagaattaacaatgaatatcaaagaagctagtgaaaaaagtggcgtttctgccgatacaattcgctactatgaacgaattggtttaattccacccatacaccgtaatgaaaatggggtccgtaaatttggtgcagaagacttacgatggattttatttactcgccaaatgcgccgagctggtttgtctattgaagccttaattgattacttggcacttttcagagaaggcgaacacacactggaagctcgcgccgaattgctgaaaaagcaacgtattgagctaaaaaaccgcattgatgttatgcaagaagcgctcgatcgacttgacttcaaaatagataattacgatacccacctcattccggctcaagaagaactaaaagattttaatgtcgaaaggagtaattcataatgactacacttgaaaatagcgttatttttgataaaggggaactgattactaatgattactttatcggaaatacttatttaaaaatgcttgtccctgaagatactgtttacaattgtccgattgggaacgttacgtttgaaccaggagccaggaacaactggcataaacatgacggcggacaaatcctacttgtgacaggcggaactggctactatcaagaagaaggaaaatccgctcagttacttaaagagggtgacgtggtaactattccgaaagacgtgaaacattggcacggcgctacgaaagatagctggtttgtccacttagccatttcgacaaacgtggaattaggtggaactacttggttagaacctgtttccgacgagcattacaataacttataacaaaaaacccgctagccttcattcaaggttggcgggttttacttatttacttacataagctaaaatatcttctggtttttcgaagacaagttctgctttttcaaagccatctgttgtttttgcgccccaaagcgctaagccaaaatgagctccggccgcatgggcacatttcatatcgtacgaagaatcaccaacataaagcacttcatgtggctctcttccaagaatttctaatcctttaagcagtgggtctgggtgaggtttatggttttcggtatcacttgcgcaaacaattgcttgaaaatgatcctgaatattaaatggatagaaacctttttccatttctaacgcatttttagaagtaacaacgccgctttctggaatagcatgcagtactttatgaataccttcgaaaacctctacttcttcaatgaaagttgcttctctttcaatccatttacccaatactttttcttgatctaaaatgtttaattgttccaccgcagctgctccagtaattccaagtacaaatcgtagttcatccagttcataacttaatccttcttccgctaaaacagcttgaagagaatgtaaaacagctctttccgtgtctagaatagttccatctacgtcaaaaattattgctttatacatataaatgcctccttcaagattttgcgaagttgtgatagtggtgggttgtatatcttgcttttttcttattttcagctttttggattgctgagctatcggtacctttattttgaagcaaatctcggaattcgcgcaaattatcatgggaatttccatttatttcaaattcaatattatcgcagctaaatgttagcatgatttcctcttcttctcgaactaacgccatatgacctaatttcgcaactggaaatgtttgtcgttttttcatacccaaactgaaatcttggtcaaaaacaagatagtctctatcgatgtaaaactctccgaattgatactccattccaagtgctgaattaatcttgcatactccatctaatttcatatcattcgcctccttcattgccttatatattagttttaaatgatgaaatgggtttcatgtcaagcaatttcataaaaatatttttaaataagttttttttgctgttcaaaaatatttagaatcaagtcaatcacaattaaaagcggggcatgatgatgtttaaatgaatcttcaccaaactcctcacttgaagcataaataatcgtctccacatattgagaaatctgcgcattaggattattcacgatagcaatgacattcgacaaattatattttaaatgttccgcgagcgaaagcgtattttctgtgccaccgctttcagaaataataataattaaatcatctctttcaacaatttgtggcaaaatatcaataatgaatgaatcatacgtaaaaactacattctttttcgatgtaacaagacttttggaaaaatattctcctaatgttttcgtcatacctagacaggcaatatagattttaggcgcataagcaattcttgtcgcaacttgctcaatttctttttttggaagttgctcaattcctaaacgaattttttctaaaaatgtagaagaatagtctttggaaaggggttttgtttctgttttatccgagtgaagtaaaaatttcagctcagagaaaccggaaagctttaatttatgacacattctaataacagttgtagtactgacattggtggactccgctagagatgtgagtgacattttttcaatgatagaaatatggttgtcaatatagaagaaaacttgtttttcagcaggacttaaaaattcaatttgaggcgcaaacaagcgataaagcgaagtggctgacataataaatacctccatggctatccgaattaattttagtatacatgaaataaaagcgattgcacaacactgcgtacaattgtacggttttcgtactttttcaataaaatattatggtataactaaagtaacctagggaaaagactgttaataaaggagctgatagcattgaaattaagcgatattacatcggagccactcatctttttagataaagattggcgcactaaagaagaagtatttgatggattaattgatgctttacacaatcaaggagttttgtcagataaaaatgaattcaaaaaagctgtcttagaacgcgaaaagatttctgaaactggtttagagaaaggttttgctattccacatggtaaatctaaagccgttaaaaaagctgcttttgcatttgctcgtatcaatcaaccaattaattcttggggcagcattgatccaacaaatgaagtaaaatatatctttttattagctattccagaaaacgaagccggatcaactcatttagaacttttagcggcattaagtaagcgtttactagaccctgcttttattgagagcatttctaccgctccgacagtaaacgaatttatgaccgtactagattctgaacaacaagaagatgaaaaagtagattacacacgaaaaatcgttgctattacagcatgtgcagcgggtatcgcccatacttatatggcagcggaagcccttgaactagctggtaaagaacttggtattgaagttatcgtcgaaaaacaaggtgcgaatggtattgaagaccgcattactcctgaaatccttaaaggcgcagaagcagtcattttcgctacagatattacggcaaaagataaagaacgtttcgccggaatgccttttatccaaagacgtgttgctgagccacttcgtagcggtaaagaaatgattgaaacagtattgagcaaaccagatggctatgtaaaagctgatacagatggttcggaacaacaatttgataataataagagcagtattttctcacaaatttatcgtggtattttaactggtatttcttatatgttacctgttattgttgcaggtggtttaatgattggtattggccaacttggcgcaactgcctttggtcttgaaaaagttattggtaatccagagtatgcaacaaactctaaccagcttattgtaatcttccattatctcggtttatacggaaatatgattatgaaattcatgtatcctgttttcggtgccttccttgcttactcgattgctgaccgtcctggacttgctcctgggtttatcggtggtgctttcgcagcggggctacattacaccttctggggcgtagatggcggtataccatctggattcttcggtgttctaattttaggtatcattgccggatttgttgctaaattcttaaacgaaaaaattaaactacacaaaaatttacaagctatgaaaccaatgttcctgattccagggattaccgttttagtcttgttcttcgtcaattactatgtggtcgacccggtattcgggggcttaaacgcatggttacaagaactaattattcaaaatcaagatgcaagtgctgtactactttcgacaattattgcttgtttgactgcatttgacttaggtggaccagtcaataaagcagctggagctatcgcaatcggactcgcagcagacggaatcttcccgctaactgctcgtgttttagcaatcgttatcccgccaatcggacttgggcttgcgactgtattagataaatatgttgttaaacgtcgtgtttttgatgaaaacctacgtgttgcaggtacaacctctattttcctagggtttattgccataggagagggcgcgataccgtttatgctacaaaatccgcttatcacgattccaattaatatgattggtgcttctcttggtgcggttactgcagtattacttggtgcagtacaatggcttccacttccagcaatttggggttggccgctcgttgaaaatttctgggcctatgcgatcggtttaattgtaggtatcgcctttattacattcgcgaatatcttcgtacgctacggcttaatcacacgtaaagaaaataaaatcaaataaataaataagctgacaggtactctcgttagtacctgtcacttaatttgagaggtttttaaaatgaaaaaaaataaaattgtacatgttgttgcacattcccactgggatcacgaatggtatttcactatggaagattccaatatcttattaattgagaatttagactatcttttaaacgttttagaaacaaaagattcatttgctagttattcctttgatggtcaaatgtctgtcattgagcgttatttagacattcgtccggaaaataaagcgcgcgttcaaaaacttatccaagatcgtcgtctgttcgtcggtccttggtatacacaaaccgatagcttgttagttaaaacagaagctgtgattcgtaacttactttatggttataaaatgggcgaagaattcggtcatagcatgagtatcggttattccccagatatttttggccagcatgcttatctgccagctatttataaatcatttaatatggaacatagcattttccagcgtggtgtttataatgatcaagtacaagaggaccttaacttccactggacttctccagacaacaagtccatcccaaccaacaatattttcttcggttatggaccaggtaaatttttaagcagtgaaaaaagttatgtagaaacgcgtcttctgcctattttagatcgacttgctgaaatgaacacacatacagatgtccttcttttaccagcaggcggcgaccaagtacttgtgcgcgaaaacttcccagaaattgtcgcggaattgaacgagatggacttaggttataccttcattctgtccgattacgaagcatttatgaatgatgcttggacttctactttcccgaacgaaatcactggcgaattgcttgcttgccaaaaatcacgaatccaccacacatgtcgttcagaacgctacgatattaaacgtcttaattacttagtagaaaatagattagtcaacattttagaaccacttgcaacaatggcaaacaaattcggcatcaaatatccaaaaccttggttagatatcatttggaaaaaattatttgatagccatgctcataacggaattggtgcttcgaattcagatgacgcgaaccacgatatcgtcgttcgcctaacaagcgcacttagaatgacagatggcttaattaaccttttgaaaaaacaaatcacgaaggccgttagtcaggaaatgggcgacgaaaatattgcgctactattcaatactaaccctgtaccagaagaaagaacggcaaaactaacattatttactcctgaaaaatcattccaacttttctccggtgacaaagaagtgaccttcagcgttgtacatcaagaaaaattagatggtggacggaaagtaatcgtaactgcaaaaggtgaaaaagaagtcgctgttcccgattattatcgtacagaaatctacctgaaaaccggcccaatccctgcacttggttacacaacattgcaagtgaaagccgttgctaaagagatggaccaattaatcagcatttccaaacaaacaattgaaaatgaaaaaatcattgttcaattcgaaaacgggaaaatcaatcttttaaataaagaacaacaaagcattattaatgacctaattcgcttcgaaaatgtggctgacgctggggattcctttgacttctcaccacttgaaggcgaccaagccatctatatcgaatcaagcgaattactaaccgttgaaaaaaatcatctatatagcaaaatgatgttaaaacatactgctttagttccgaaagatttagaagcccgcgcccaaaaaacaagtacagaaacagttgaaattttaacagaaatcgaactttttgacggcgaagaatttgttcgtgttcgccatactatcgataataaagtaaaagaccaccgcattagagcattgatcaaaacaaatgtagcagaacctaaattttcttacgcagatcaaggttatagcctcatgaaacgcagcgtcacaaacccttaccttgcaaactggcgcgaggacaaattcgtggaagcacctgtgccgattttcccagtggaaaatatcgtcgctgtttctgaagaagacgcaacacttgccttgttagttggcggtatcaaagaatatgaaatcttaccgaaaactgctgaaatcgcattaactcttttcagaagtaatggtttgcttggaaaagatgatctcatgtggcgtccaggccgcgcttccggtattaataacaaagtcgttcctacaccagacggtcaaatgctcgaagaaatgatttttgaatatgctgtgtacgtacaacctgagaaactaaatgaacaaactctctacgcgcaatctaacatttttgaaggtcatacagaaacctatcacttacaaaacctaaatacatttgaagagcgcctagaacgttttgaagtagattatccaatcgatcgtctgccagctcaaaattctatctttgaattagataacccgaacgtattcatgagcacttgcaaaaaatcatgggatggcactggcacaattatccgcctatttaacccatcagacaaagaagaaaccgttcgctggacaaccaacgcttccagttttgaagtttcactagcggaggaaaaaatcgcagaactaaaagaaaacactatctgtattcctaaaaaaggatttgcaactattttgttggaaggagaataatatgcaaaccgaactggttaatcaaatagaagtaaaactaagaaaaatttatcaagccgcataccaacccgcatacttggaaaaaatgctcgcatgcgctgaaaactattctaataatacgcgtggttctattgatactatttccgaaaaaaatgtctatcttattgcctatggcgacagcattttcgaaaaaaacaaacatccgttacaaacattgaatgaattcctacaagaatatgcacaagatgctattacagacgtccacttactaccgattttccctagtacgtcagatgatggcttctctgtcacagactacaagcaaattgacgaacagcttggcgactgggatgacgttcaaaaaatgtctgagaacttccgagtgatgcttgatttcgtagccaatcatatgtcgaaatcaagtgattggttcaagcgattctccgataacgaagcgccgtacaatcaatttttcatcgagaaggacagccaattcgattataaaaatgttactcgcccgcggacttctccgctgttccacaaatacgaaaacggcaaggaactttggactacttttagcgaagaccagttagacttaaatgtccgtaatatcgattgccttgtagccttaacagatgtcctgcttttctatgcatccaaacaagcgacaagcattcgtcttgatgctattggatttttatggaaaacatctggcacgacttgtatgcacctaccagaaacgcatgagatcatttcgctttggcgtctgctgattgatgagctatatccgaatctgcaaattatcacagaaaccaacgtccctcatgaagaaaacattagttattttggcgatggcaaaaatgaagcaaatatggtttatcagttcccgcttccgccacttgtgctccataccttcacttgccatgatacaacgaaactttcgaagtgggcgaaatccatttcacaagtttctgacacagcgacttattttaacttcttagcaagtcatgacggaattggtatgcgccctgcgaccggaattctttccgacgaagaaatcaattctctcgtccaaaaagcggtccaaaacggtggacaagtttcctataaagacaatgcagatggcacgcagtcggtatatgaacttaatattaactacggtgaagccttgcaaaatctagacgaagacacaaccgaagaactcgtaacaaagaaaattatcgctgctcacagtattttactaacacttcaaggtgtcccagcgatttactatcattcccttctaggctcaaaaaacgaccttgttggttatgaagaatcaggtattaatcgtcgaattaaccgtgaaaaactggaaaaaaatcaattggttcatgaacttaaaacagacacttatcgcaaaaccattttcacatcgctgaaaaaattggtgcaaatcagacgaaaccacaccgctttttcaccatttgcaacccaagaaattttagatttaggaccagatgtttttgcgataaaacgggaatctgagggagaatgcatttatggaatcatcaacgttacttctcacgatatcagcaaaaaagtcgctttctctggcactaatttgttagccaatcaacccgttacgagtgagctcgaattaactgcatatgaagttgtctggattaagaaggcggtccaatgaaaatcgtcatcgcacctgattcattcaaagaaagcgccactgcggtggaagtagcaactgccattaaaaaaggctggactaaagctcgtccagccgatcaaataagccttgcccctgtttctgacgggggtgagggttttcttactgttttaagtgagtcttccgaggtggaattgttccaagcagaagtaaccaacttaaacggtcacaaaataatggcctcctacggtattcacgcccgccaagaaactgcgattatcgagtccgccaacacgattggattagatttaatcccagcggcagaccgtaatccagcccatgcaagctctgctggcgtcggtgaactaattttggcatcactggatcacaacgtcaaaaaaatcattatcggccttggtggaagtggcacaaacgatggcggcgctggactaatccaagctttgggcgttgcactacttgataaaaacaaacagcctattccgcccggtggcattcatttgcaagaactagcctacattgatgccagcaaccttaacccaaagctgaaaaacattcaattccaaatagcctgtgacgtgacgaatccacttcttggagaaaacggtgctacatttgttttcggtgctcaaaaaggggcaagtcccgacatgctcgttaaactagagaacgccatgcagaactacggagcaaaactcgaccaattttcttctcaaaaaatcaccacaaaaaaaggagctggagccgctggtggtatcgctgctggactaatgaccttcctaaatgcagacttattaagcggttcaactcttgttatggaactttctaatatgaaagataaaatgaaagacgccgatattgttattgttggtgaaggacgaatggacaagcaatcgatgatggggaaaattcctgttcaaatcgctcaagaagctaaaaaacaaggttgcttcgttctggctattgtcggcagccttgcactcgaaaacaacctagcccagcagcacggcatcgatgcttttttcccaaacatccctgaaataacagatttacccactctttttgaaaatacgacgaaaaacctcgaacgtacggcggaaaacatcgccaaactaactttaattggcaaataatttttagactgtttttcttctaatcaactcatgctccactttaattctttgcaatttgccttgctcaaaaatagtaaaagcattttctcccaatttttttaggttatgatcaagcgttgtgatttctaaaaccttaccaattgggagattttcttgccctaaaatagcgacatcttccggaacacgcagaccgagttttttcacgtgatacataacccccgctgcaacctcatcaccattcgcataaatcgcatcaggccagtctttccccgctgcaaaaaaatgctccccagccttcaaaccatcttcaagcgtataacactcacttaaaaaccgattatcacccactggaccaaaaacttgctcataagcattaatttttccatatgtactcgtactttcacgcgatgctctccccgctgtaaaagccacttttttataaccctcatcttccaaaaactgaaatcccgcgcggtatgccttcacgcggtcaatataagagcacgatacttcttttgattccacgtactcgcacgcaataatcggcccatacgccaggtacggcaaaatcacgtcccaattattggcacgagaagtaataatcaggccatccacctgtttcgttttaaggcgcatcaggtatttttcttcttctttcggatcatatcctgttggaaaaagcgtcaccgaataacggtttttaaaagctacttctaaaataccatttacaattttgtcaaaccacggatgatcattataaggtataatcacgccgaccgtatttgtttttccacgcgctaaatccatcgcactacggttaggagaatagtctaattcatcgataacagcttgcacacggactcttttctcctccgcaacatacggatggttattgagcacacgtgatactgtcgtcactgaaactcccgctaatttggctatttctttaatatttggcattttaaaaacctcattcctaagaaaaaagtgcggacagatttctcataccgcacttttatttttatcattaagccatctgtccaagttcgcttgtttggatgtctttttcaacacgaaccgaaaccagtctggcatcattcatttcttctactgtaaatcgaagtgtaccgtattctactactactttatcatcttcttctggaattgtcccagttaaagtaagcacaaatccagccacagtatctactccacgtgatggaagttccacgtgaaacattttgttgaaatcatctagtggcatacgaccttctacgataaatgtcgtctcatcaactttcttcacttcatccgaaaacacatcgttttcatcgtcaatttcgccaacaatttcttctaataaatcttctacagtgacaatacctgcaacaccaccgtattcatccattaaaatagccatttgatttcgagttctttgcatgtttttaagtagatcgtcaataaacatcgtctcttgcgcaaaatacgcgtctttaacgagtcctttcacatcaatgttttcaaaacctgactttctcgcttccgcaaaaaaatctttcatatgcagaataccccgcacggagtcctgatcgcctgtatagacgggaacccttgaaaaattctcacttaataatgcgtcacaaagttcttccgattctgtttcggcatcaatcataaacgcatctgttcgtggcaccatcacttcacgtgcatatttattatccatttcaaatacaccacgaagcatttgtaattcttctacctcaattacaccgtcacgtcgaccggtttcaatcaatagctgcatttcctctcgcgtcattttttcattatccgtatttttttccattctcgttaatttcacaagaatatcagttgaaaaagataggaattttacgaacggacgaagtacaacaccaactgccatgattggtcgtacagaaacacgggcaattttttctgatttttgaagtgctaaacgttttggataaagttcaccgaaaactaacgtgatatatgataacacaatagttacgacgataatggataactctttcgcaaaactacttcctccaaaaacagattcaagtctagtcgcaatactagtggcggctgacgcactggagaagaatccagcaagcgtaataccaacttgaatagtagctagaaatttacttggatcatctacgagtttagctagcataaccgcttttttatcaccggtttctgcctggctttttacacgatttttgttcagtgatacaagggccatctctgctgaggcaaagaatgcgttgagcatcgtcaacaccacaataagaattaactgcaagataatctgctgactctcggggtcagggttcatatggaactctccactccttattttcatcgagaaaacgaccatgcattttctctaaatattccggacaatttgccggttaagaaaattttatcacgccacccctattactgcaaggtttcaaatctcctcgaaaactttcaccgcgtcactttccatcatttcaaatggataaggaagcgaaattcgttctttattcacagcaaaaattcgtgcttttttattccgataatccgttaaattacaaaacggactcacacggaatgacgttcctactatgacaatcaaatccgctttcctaatagcagtaagtgattgatctatcgcactttctgaaattgcttcttcgtaaagcaccacatctggccgaataaccccaccacaatccgtatgaatatccgatttcaaataatcctttgcggtaacagtcattccgcagttttgacaataacaatgatatagactgccatggaaattcactacttttttcgaacccgctttttcatgaagtccatcaatattttgcgtaataatcgtgacatctttttctgtttcgatttcagccatcttcttatgaattacatttggcacagcattaggatagtacatgttctctgtaacaaattgataaaacttctccggttcacgcacaagacacgtatgactcaacatatattccgggctactcatcccagcatataagccgtttttcgagcgataatccggaattccagaagggacagaaacacccgccccagttagaaaaacgatgcgttcagcttttttaagtgcttcattcaacttattcattctttaaattcctttcatttgtatgttgtttatctttccagttccaccattttcgcaaatcaacatcttgctccgcttcatccgtttccgcaacatagactgcgcagcgatacgtataaagtacacaaggatccattctctcgcctcgcttatcgcaagtatcctcatataactcaagcggattcctcccccttaaatcagcaacctcttcaatcccaatttcatttaacattaacaccatttttttacctattcctggtaattgtattagattagttggcatgattccccttctctccatgcatttttcggttgaaataaaaactgattagtacattgataaaaataaagccagcaactacgaggaagacatctccgtaaccaaaatgagcagcaacacttgacccaacaagcggtccgatgacattcccaatatattgaaaagattgattataaccaaaaattcgacctgcaacctcacgcggtgtattttttgtaagcaatgattgaaccgccggaagcaaggcaccatctgtaagacctaataagaaacgcaaaataccaagttgtagtgggttttgtgcgaaagccattgggatttgtagtaacattgagccgatgagcgcacctaacaatatccgctccgagccaattcggtcaccccacctcccaagccttggtgccgcaataagagccgcaactccgggaaccgatgcaatcatcccactaataaaagcaatattttgtgcatttcctgccaaatcacgtacatataatgtcaaaataggattaactgagttggacgcaatttgaatcatcatcgtcgtaatgaacaaggaaataattaagcccgggtttttaagcgataagaaaacttctttccccgaccgcatttcctttttttctactggcgtaaatttctcttttacaaagaaaagtgttaagaaaaaactacctaaaagaagtactcctgtgatgtaaaatactggtctaacaccaaatgtgtccgacaacgctccaccaattaacgggccaattagcacgcccgaaaccgctgccgttgatagtgccccaagagcccagccactacgatgacgaggaacttgtgtagcgattagcgcattggcagtcgaaatatatcctgaaaaaatccccattaataagcgcaaaccaacgaattggtatacattgcttacgagtcccatcaaaatcatcgctatcgccattcccagtgctgctcgtaaaagcataattctccgtcctttttgatccgctaatttaccccaaatcggcgacataatagctgatactaaaaaggtcgaactgagcgcaatccctgaccacatacttacttgatccggattatgtacgcctaattcttcaatatataatggtaaaaatggcatgattaaatttaatccagtcccggttagaaaacaccccacccagacaacatacaaattcttcttccaattttccataaatccacctagattcttctatcgttatccttaattattccacaaaaaaagcgaaagtaaaactaaacccttcgcttttttgctatatttacttaaaatgttccacgtgaaacattttatacttctaaattttctcgtggtacccagccagcttcattttcttctgtcacgcaccaaacccaaccattaagttcacgattactttctaatttatcgcctggtttaacatttagttcacgtgcagagtaatcttctgatacggtcccactctttccatcattacttatttgaatgatttgtttcggaatccatccttcttttccagacgacttcactttacaaaaaatccaacctggatattctgtatcttcttcaaacacccaaatagactcatttttatttacaaaaagcggattagggtattggctaatgtgctcttttttcacgataaatgtttgattcatagtttgaaacctacctcattatttttttgccgcttcccaatctgcaagaaatttatcaatcccgctgtcagtcagaggatgttttaacatttgctcgaatactttaaatggcacggtagcaatgtcagcaccggctttggcacattcaataacatggattgggtgccgtacgcttgctgaaataatttctgttggaatcccgtgaatctcgaaaatatccgcaatgtcacgaatcagaaccaagccatcgtcgcctatatcgtctaatcgtcctaaaaatggcgatacataggtcgcgccagctcgtgccgcaagtaaggcttgtgtggcagaaaatacgagtgtcacattggttttaataccttcttccgtcaacacttttactgctgccaagccttccccagtcattggtattttcacaaccatattcggatggattttcgcaataactcgaccttctgcaatcatttcatctgcttctaaactaactacttcgccgctaattggtccgtcaacaatggatgtaatttcttgaatgacctcattaaaatcgcgaccttcttttgcaacaagtgatgggtttgtcgtaaccccggaaataaatcccattctgttagcctttttaatctcttctacgttcgctgtatcgataaaaaatctcattaaaacatcctccttttctatcaagcgctttcaattacagagccattataacgcaaaagcttaaataatgctttcgatgtgctttttcggcataaaaaaagaatgccgtttagcattccaaaaagtttcacgtgaaacaaaattataatcgagttttatccatcactaagagaggctttggtctatttctaattatatcctctttaattaaatgcatgactgtatgagccacatattcgcgtgatgtatttgtgtatcttgcaagtacttcttgcgtaatttctcttggtagcaatatcccgttatcagaaaacgttcctaaagtttgagcgcatttgagaatggctttgcggattcgttcttccttttttaagaagcttagttttgcaaatgtatgggcttcacgtaattcttctgccatcactttaatcataaaaaagttattctcatcttttttgtcaaaaatagagaacaagaaattgctatctacttccataacttctccgtgacctaagctctgcatcgaaacatgcgggctccattcatcgtaaaaaagatgatatagtccaaaactatctcctttttgcaagaaacgaacaatgcattctttacagctttcttcttccatttctgcatcttcctctacaatcatcccgtatatgccgcttagaacaaaatatacttttgttccagccggacttaaactttctagaacctcacccttcttggtgctgataaccgagcagtagtctttgtaatttggatgttcaaagcacaactccattaatttgctaaccgttagattggattcaagctcttttaagaatagcatattctctcctttgctatattatattgaagaaactcttcgtaattatatcataaaggccatattcaaaatcctattcacagtaagtcataaaaagccaaaaacccaattaaagataaatatattacaactttttataaaatacttaatttatatctcgtttccaattaacattttgacataaattcgaactttttgttacttttgttaaatattcaaattcagatattaattcaataattaccactttagactggtttatttttaggtaaattgattatacttaaaaagtaagtaatttatggatgggtaactcaggaagggtgaaatgaatggatcagaaaaaatatagttggcgaaaatttttccagttacttattagcgcaaaacccgcgaattggataattttctgcgctttatttgctagtgtgataactacagttgccggccttgttgtgccgctttttacaaagaacttaattgatggcttttcaatagcttcactcgatgtaaaaatgattgctttaattgtgttggcatttatcctacaagcaataacgaatggcttctcgattttcttgcttaactacatgggtcagaaagtcgttgcaacgattcgcgaacgtttatggaagaaaattgtgcacttaccagtttcttacttcgataatacaaagactggggaaatggtaagtcgtatggtaaatgatacagtagtggttaaggagctgattgccgatcatctcccacaatttgtaactgggataatttctgttgtcggtgcgattattatcttgttcttcatggactggaaaatgacactcatcattttagtggccgttccaattactgcgctagttgtcgcgccacttggtcagaaaatgtttaaaatatctaaaggtcttcaaaatgaaacggctaacttcactggttccattagccaaacgctatcagaagctagactcgtaaaggcttcgaatgcggaaacactagaaaccgaggctggtcatcaaggaattaatcgcctatttggctttggtattcgtgaggcgaaagttgttgctgtgcttggaccgctaattttctttgttgtcatgggggttattgttggcatcattggttacggcgggattcgtgtttcagctggaacaatgactactggtacgctcatcgcctttttgctctatctgttccaaattatcgttcctgtcacttctttcgcaacattcttcgcccaacttcaaaaagcaaaaggcgcaacggagagaattgcggatattttaaatgaaacagaagaagatttcgacgctggtaaaaaagtagatgtgagcggaaaaaccattcgcgcatctgatatttccttctcctataatgaaggtgaacctattctaaaacatgtttcttttgatacaaaacccggagaagttatcgcattcgctggcccaagtggtggagggaaatcaaccttatttgcgattttagaacgtttttatcaaccgaaaacgggagaaattttagtaggcgatattcctctttccgagatttcgattaactcatggcgcacacaaattggttatgtttcccaagaaagtgcgatgctttctggtacaattcgcgataatctttgttatggtttggaccgagaaattacggaagatgagctatggaatgtagcaaaactagcttacgctgacggttttatttccgaacttcctgacaaaatggcaaccgaagtcggcgaacgtggcgtgaagctctcaggaggtcaaagacagcgaattgccattgctcgagcattcttgcgtaatcctaatatccttatgttagacgaagctacagctagtttagatagccaatccgagcaaatcgttcaacaagcattggcaaacttaatggaaggtcgaactacttttgttatcgctcatcgcctttctactatcgtcaatgccgaccaaatcctctttatcgaacatggtgaaataaccggtcgtggcacacatagtgaattagtggcttctcatccactttacgcttcctttgcagaacaacagttaaaataactatttcccgggaaataaaaaagtgacgatgcgtaaatgcatcgtcgctttttctataaggattgatgaaactttttgagttcacttttctttgcttcgtctaaatcatgccacctgataccttgcacagctccttcaagtgcacataattcacttagacaaacgcttgaatcattttcccaaatacgtaaaaaggcttctttgcttccaacatcttttagctcagctggggtttttatcccggcttttattaagtcttgctccagtactttgccaatgtttggtaattcgctaaggttcgccattacagttccttcttccatattattttggtaattctattttctcgataccgcccatgtaaccttgcaatacttttggaatgcgtacagaaccatctgcatcttggtaattttctaaaatggcagccactgtacgtcctagcgctaagccggaaccattaagtgtatgaacgtattctggcttgcttcctggttcacgacggaaacgaatgttagcgcgtcttgcttggaagctttcaaaattactgcaagaagaaatctcacgataagaattgtagcttggaatccaaacttctaaatcatattttttagcagcagtgaagcctaaatcagccgtacacatgcttagtacgcggtatggcaattctaagcgacgcaatacttcttctgcgttaccagttaatttttctagcgccacgtaagaatcttccggtttcacaaattgaactaattccactttgttaaattgatgttgacggattaaaccacgcgtatcgcgaccagcagatcccgcttcagagcggaaacatgcgctaaacgctgtatattttcttggtaagtcttctgcttttaaaatgtcttcgcggtggtagtttgttactggtacttccgctgttggaataaggaaataatcttctgcttcaattaagaaagcatcttcttcaaatttcggcaattgaccagttcctgtcatgctcgcacggtttaccatgtaaggcggtaacatttcttcgtagccatgttcattcgaatgcaagtccatcataaagttaataagcgctcgttccagtcttgctcctaattttttataaaagacaaaacggctaccagttactttcgcagcattttcaaaatcaaggatatctaagtctgttcctaaatcccaatgcgcttttggttcaaaatcaaatgcgcgtacttcgccccatttgcggatttccacgttatcgtcttccgattcgccaaccggagtagattcgtgtggaatatttggaatcgacattaaaatcatatctaacttctcgtcaatttcgcgtagttcgatatctaatgttttaatacgatcaccaacaacacgcatttcttcaattttagcatccgcgtcttgtttttcgcgttttaatttagcgatttcttgagacacctcattgcgctgacttttcagcgcttctgtttccacaatcaatgtacgacggcgtttatctaactcgccaaatttctcgaattcaccaaggtcttctccgcgattttgtaatttctgctttacttcatcaaaattattacgtaacaatttaacatctaacatgctaactcctcctttatttttttccatataaaaactcccgtactttcccgaattaacaggaaagggacgagagttaaccgcgttgccacccttattgggatctaaaaaaatccccagcttcatttaggtttaacggacccagccggaatgatttactcgcaaaaccatgctttccaccactcactccaagatggattcataaggaaacttcaccagttcacaccaaccactggctctctttagaaactctaccttattactacttcttgtcttcgcttttcgtattaatttaaagttattctatcgcatatctgcttaaattacaagcaaatctttaaccaattaaatcgagcgtgtctggaccgtcatcatcagaattcagtattctaatttgttccggaacaatttttataacgacaaaggatggtgaatcttcgcctcggaaccattctttagaaatattttcccaaatacgttctttgattgattcatcctcttcaagagacgccaaaccattaatttctaaaaacgcagaaccagggctttcgtaaccaattaaaacggatacgtgtgggtttctgcgaacttcgtctgtcttcggtaattctttgccagatggtgtataaagggttaaaccatcatgcagaaacgtcatatacctagcgtgcggataatctccttgtacggatgtcaatacacccacttgatgttgttctaaaatggcaagaatcttgtcttctagttcatttctcatctcaaacaccttcctttggttatttagtgtacctttccactcgtctcccggcttcaaacattcgggcttgttatctctctagctatttgctataaaagagtataaccgttttaactagggggatttaaagtgattttaatcatcgaccataatgattcatttacatataatttataccaatattttttagagctccaagaagaggtgcaggttgtctctgctaccagtttttcacttgaagcctttcaacaactcgctcccgaaatggtagttttatcgccggggccaggttcgccggaagacttccctgtaagtttagcactactaggtaaaattcaagttcctattctcgggatttgccttggccatcaaataatcggtcattttttcggggcaaaagtggtaccagcaaacgtcccagttcacggaaaaacaagtgtcatttcgcatactggggaaggtttgtttgcagaccttgaacctgctttccaagtaacgcgttaccattccttagttatcgatcctacaacagttccagtcaatttgaaagtaaccgccgtgactgaagacggcgttataatggggctagttcatgcaaccaaacccattcacagcgtccagttccacccagaagcaatcctatccgaaaatggacatgcaatacttaaaaactttgtacgattagggagaaatgttaaatgagcttattacgatttgattttgaaggcgacacaaagatttttgaaaatccactgtatgaactagttgcatatgatttagcagaagttcttcctataatgaaagctgccgaaaacgcccaaaaatcaggaaaatacgtcgctggttttgtcagttatgaggccgctcctgcttttcgaagtaatttaaaaacaaaaaaaccgagcgaaagcatgccactcgtttggtttggcgtatacgataattttaccgatacagctaccgaaacacctgattcctcgccgctctcttttaaaatggatactagtttccctgaatacaccgagaaaatagagcaaatcaaagctgaaattgctgctggaaatacttaccaaattaactacaccgtgcgacttcaaagtgatgtgccaaacaacttttcttctcaagcaacttatgaaacgttacagcagattggaaaggcgaattacaccgccctactttcaacaagtgactttgagattatctccgcctcccccgaactcttttttaaatggaaggaaaatcttctaacgactcgcccgatgaaaggcactattcgtcgcggaataacggagcaagcggacttagaagcacatgattggctaaaaaacgatcctaaaaaccgtgcagaaaatgtgatgattgtcgatttattacgaaatgaccttgggatgattgcggttcccggaagtgtcaaagttcctcagttaatgacgctggaaccttatccaactgtttggcaaatgacttcaactattactgcagaaacacctcctgagactgatttaacagctgtttttaaagcgctcttcccgtgcggctcgataactggcgcgcctaaagcacgaacaatggaaattatttcagaactagaagattctcctcgcggtgtatactgcggaacaattggctttttagaacctaacggaaatgcgattttcaatgtaccgattcgtactattgctatcacagacaataaggcaacttatggcgttggtggaggtatcgtctgggattctgaagctgctagcgaattttccgaaatccacgcaaaatcagctattttagaaaaggcgacgaaattttctttaattgaatgtttgcgaattgaaaacggtgagctcttccgaaccgaatatcatttaaaacgactacaaacaagcgcagacttttttggcattccttttaatagggaagaaacggagaagctatggaccaaaacagcgcaaaaaaatacgaccggcacatacaaaatgcgctttttattacatcctgagggcgcacatgatttagcactaacaaaaattgacaccaaaaacaagcgaataacagcgcaacttgctgataaaccagtactttcgaatgatttatttctctatcataaaacgactcatcgaaagatctatgaagacttaaaaaatactcaaaccgatgaaaccctactttggaatgaacagggtgaactgacagaatttattaacgggaatatagttctaggtataaatggctgttttttcacgcctccagtaacttcaggtcttctttcagggacaatgagagccgaactattagcaaaaaataagatttccgagaaaacactagcaaaaaaagaccttttagaagcggactatgtgtggttaattaatagcgtaagaggatttgtagaagtagaaattaaacaataaaactatagaaatttcacaatttaaaatgaaataatttgtcgaattcgccatattttcgccatatttacaatttgtgaaaatattacttgcaaattttcacaatctatattagaatatgtgttcgcacgtttttatttccgttttccaagggaggaaaatcatgaaagtattgtttcaccatctaaaaaaatacaaactacaagcgacattatctacactgtttgtagtagtcatggttatctcacaactatggcaaccaaagttacttcagcaagtcctagacgccatcatgaaagacgatatggatgaaatctcatccatcggcgcacttttaatcggtattgccgcagtcggccttatcgccgggatcctaaacacaatactttcagccaaagtcgctcaaggcgtcggcgcagatattcgtgagtctagtttccgtaaaatccaaacattttcattcagcaacatcgaaaagctttcgactggtaatctagttgttcgacaaacaaacgacattacccaagtacaaaacttagtgatgctttcactacaatcgcttacgagaattccgattatgtttatcggggcttttatcttagcgatgtttactttacctgaattatggtgggtaattattgtactcgttgttcttgttgttctgattgttgtattcacattcgggtctatgggtaaacactttgccattattcagaagttaattgaccgagtgaattctattgcaaaagaaaaccttgctggcatgcgcgtagttaaatctttcgtgcaagaagataatgaaattggtcgctttacaactgtcagtgacaaattaactcgccacacaatcatcgttggaacgcttttctccgtaatgattcctgcatttatgctcgtttctaacttagcaattgttgtttctattttctttgtaggcgatatggctgcagataatcctgaagttatcggagctatcgcatcgttcatgaactacttaatgcaaattatgatggcaattattatcggtggtatgctgatgatgatggcttctcgtgcgcttatttctttgaaacgtattaccgaagttctggaaacagaaccagatattacttacaatgaaaacgcaccagaacaagacctagaaggtacagttgaattccgtaatgttagttttaaatacgacggtgacgatacgcctgctctggaagatatttcattcaaagcaagtgttggtgagatggtcggtattgttggtgcaacaggttctggtaaatccactcttgcccaactaatcccccgactttacgacccaacggaaggtgaagttattatcggcggaactaacctaaaagatatcaacaagaaaacccttcgcagcactgtttccttcgtgcttcaacgcgcgattcttttctccggaacgattgcagacaatttacgtcatggtaaaaaagacgcaactgccgaagaaatggaacacgcaagtaaaatagcacaagcgaaagagtttatagataaacaagcaaaactttatgaagcacctgtttccgagcgcggaaacaacttctccggtggacaaaaacaacgcctttcgattacacgtggcgttatcggttccccgaaagtactaattctagatgacagcacaagtgcgcttgatgcaaaatctgagaaattggttaaagaagccctgaataaagagcttgatgacactactacattcattattgcacaaaaaatttcttctgttattcaagcagataaaattctcgtgctagataaaggtaaactcgttggtgtgggttcccataaagaacttctgaaagaaaatgaaacttaccgtgaaatttacgacactcaaaaaggcaaggaggtaaccgcataatgaaagagttcaaacaaattagtcgctttttctggcactatctgcggggttataagcctcaactttttgtcattttaattgctgtagtttttgcgacataccttcaagtaaaagcaccacaatatattggtaacgccgttcaagaacttggagattacgtggttaatttaatgcaaacgggtgttgatgacaagagtgacttcatccatatcatttggatgctgattctctgctacgtactgctcgctgctgccacttttatccaaagtatcattatgacaggggtagctggtaaatcgacgaacagaatgcgtatagggcttttccgcaagatggaaaaactatcgattcgtttcttcgatagccgcaatgatggcgaaatgcttagtcgttttactagtgacttagataatatttccaatacactaaaccaagcattgatccaggtgctatccaacgtcgcgctaatgattggtgttatcatcatgatgttccaacaaaacgtggaactagccttcgttactttaatatctgctccatttgcgattattattgcaacagtgattattcgaaaagcacgtaaattcgttgatgttcaacaagatgaactaggcgtacttaacggctacattgacgaaaaaatctctggacaaaaaatcattatcacaaatggtttagaagaagaaacaattgacggctttgttaaacaaaacaatatcgttaaaaacgccacttataaagggcaagtttactccggtttacttttcccaatgatgcaaggtatttcactattaaatacagctatcgttatcttcttcggtggatggttagctctaaacggcgaccttgaacgcacagccgctcttggtttaatcgttatgttcgttcaatattcacaacaattctatatgccacttacacaaatttcgtcccagtacagcttgctacaactagcaatcactggtgcgcgccgtgttagtgaagtatttgcagaggaagaagaagtagaacgcgaaaacttacaaacaattgatggtattaataaaggtgtcaaactagatcacgtagattttgcttatgaccctgcaaaaccagttttaaaagacgtttcgattgatgtaagtaaaggtaaaatggttgctcttgtcggtccaactggctctggtaaaacaactgttatgaaccttcttaatcgcttctataatgtcgatggtggcgcgattctctttgatgatatcgacatccgcgacattcgccttgattcccttcgtaaacaagtcggtatcgtgctacaagattccgtactatttacgggaaccattcgcgataacattgttttcggtaagccggaagcaagcgacgacgaagtaatcaacgctgcaaaacaagctaacatacacgacttcattatgaacctagaaaaaggttatgaaacagaaatcagtgatgaaaataatattttcagcgttggtcaaaagcagcttatgagtattgcgagaactattattacgaacccttctcttctaattctagatgaagcgacaagtaatgtagacaccgtaaccgaaagccgcatccaaaaagctatggacaacgtaatctccggccgaactagcttcgtcatcgcccaccgtttaaaaaccatccttgatgccgaccatatcgtcgtgctacatcaaggtgaagtgattgaacaaggtaaccatgatgagttgatgaaggcggaaggattttattctgagctttatcataatcagtttgttattgagtagatagacattttctctacagtctgaaataaagtgagttcttacgagattttagtaagaactcacttttatttttcattatataattggatataaacccgttattgacatctgctactattaagaattcgattgaagtaaagattgtaagattaaaataaatagaaactctgtttttaagaattttcctagcatacaaagtctcattttcatcgcaaagattttatgttaatattatttagaatagaaagaaaataaaaacagaggtgaacatacatatgaattttaatttttttgttagaagtggttttattggccttattttactttttgttatccaagtattagggattataagggggttattgattcaatctggctttatggatggaagtattgatcagactttactagggacaaagcttattatagtaccaatcatattttttactattagtgttattttcttcttattatggttttataaagactatcaaaaaagtcgatttcctaattaggaaatcgactttttcatgttaattaaaccaaccttttacaccatcagaaacgtaattacccatgcctgtaaagaaagaacctactgcttgggtggaaagcatgaaccagtttgccttttcaacgtcgctggcagttagtacatcaattgtttctgtttgttttccgtcaacatagcctaacttgtcgccatcttttagagatacttccattttaccaacttccgtgccctttttaacaggtgcttctattgttttttctttcattgttacctttgtatttaacttaggagcattgccattcttcggtacaactagcttcactgcatcttttgtaacgagtccgactgtatcttcttttcctttatctactgcaattgtagaaggattttttacttttgatcctgctttttgtacttcttttactttaaaattattaaaagcataatcgagcattttgtttgtttcatcaaaacgagcacttgtatgctcgccaggcgctccaccattcgcatggagtacgactgtgataactcgcattccatcttgtacagcggttgcagtcaagcacattccagcataatcagttgttcctgttttcaaaccgtctacacctttgcgcccgtaaatcaagcccggtaataaccagttccagtttgtcatatcaatttggtctgatgtgccttttcggaactctttcttagttgtactagcagttttaagtacgtctgggtaatcatttattaagtgttttgctaacttcgccatgccgcgagctgtcattttgttctcgtctttcggtccacccacttgctgaccgccttttaagtcttcgttattaagacccgtagcgttaacgaattggtgctcccctagattaagttcgtctgcttttttattcatagcatcgacaaattctttttcagaacctgcaattttttcggaaatagcaattgcagctccgtttgcagagtaaattgccattgcttcatataattcttgtacagtatattcttcgcccagtctaagtggtacgttcgatagtgatgtgtcttgtgaaactttgtaagcatattcagaaatggttactttgtcgtcccattttaatttacctttatcaattgcttctagtaataaatattcatccatcatttttgtcatggatgcgatgcccattagcttgtcagcatcttttgaatataaaattttaccggtactttcttcaattgcgattgctgcgtttgcatttacatttggtgcttctgcggcttgtgctgctttcgggcttactaagaagccacttactgcaagggatgctgccatgattaggatccctgtttttttaattatgtttttcactgcaacttctccttcatttgagcaaattattaactcattttatctatattttcataaagaaacctatcataaaaattcccttttcgaataagtttcatttttttgacggatactttcatattttaccatgatttactagcgccgtatataaaacttttcgcccaaaagtctgagctttctatcgaataattggaaggagaatatgggacgggtattctgggctatgataaatagtctggttggcgatttggctttcagtggaattaatgaaactatcacctgtatttgggttaggatcaaacctcggaaaattacttgaagatatttcgatgcggatttgatgccctttttggaaaagattacttgttgcccaaagatcgatagtgtattcattgatgttattttgcacattagcaccgtgttgcttggctgcccggatgatgccatctgctaagttaaaagccgttccatctggaaacacatctactaatttcgctgtaaaatctgtgttaggagcatctgttttcgcccaaagtttcacttgaattggtccggtaacttcgattgcttcttttagtggttctgtcgagtaacaaaggacgtcttcgcgaagttcaatttgttgttgatcatgaggtccatctgcatgtagcgccttatgcaaggttcctccaccatttgatggtactggattttctggatcatagctaaattttgcttctgaagatgttgcaggcggtgtgaattccgcgctcactttttcatttttaaaatatagtggtgtcatatttgcattttgcggaggccagttttcagctgttttccagtcgtttaatcccatcacaaaataattaacaggcgctgatgctggtaaaggctcatttttcagccaatgattgaaccattctatatgtctagcatgcatattagcctcgccccatttagtggccgccattccaaaatcacgatcacctatcatctgagtgaaattagcatgcgtccatgggccaatgatgagcttatctccaagaccgcgtaagtgaccatttttaaaattagcgattgttttatctaaaaagcagtcataccagcccgctacatggagacctggtacattaattttatcataattgctttttgcatcgatttttcgccaatggtcatgggttggttcataatttaatagctcagagaaataaggcatttcattttgaccaattgctggccagtcttcataaggtttaaattgatacagtgtatctaaattatctagatttttcattaatgtgttcgctgcttcttctaattcatcgtgcgttttataagtacgggctagcatatttgggagcatagactctaaattccaagtttcccacattccaagttctaaagcgccgtcatgatcattgaaaacatctgtcatactattttgagccataattggagcaatggctttcaaatgtttgttcccgctaattgctgctaaaatttgcgtatagccataataggataaaccaaacatgccgacatccccgttagcataaggaaggttcgcagcccactcaatcgtatcatatccatcgtcaacttctgctatgtatggaacaaaatctccttctgacgtatatctgccacgaacatcttgaacaataacaacatacccttgctccgccaaaatattaggacgaataaagtgaagcccgtatgatttactataaggtaatcttgtaagtaaaactggatattcccccgcgtctgctggacgatatatatctgcgtaaagcgttacaccatcgcgcattttagctgggatatctgtttcaataattaattgattatgtttcacgtgaaacatctccttttcagtattgattgctcttttattgtttcgtatacgacagactatgtcaaacaaagcaacccactcaatatgagtgggttgctttgtccattcttatttatctagctttaatttggcaagcgcttcagccattgggttgttaaatggctcatcttcttgtttgttttgttttttcataaatttagctacatctgttttggatacgtttttgttcttctgtttgtcacgccgctgttggaaggcagatagtttctcccggtgtccacaaacacatacaaaaatttgtttatcaccttcgccgcgcatttccattcgtttatggcaattagggcaacgagcattcgtcgttcttgaaacagattcacgatgaccgcattcacggtcctgacaaactagcatcgtaccacgtttgcctttcacttttagcatcggcttgccgcagtctgggcatttttgtgaagtaatgttatcgtgacggaattttttatcgttttgtttaatttcagttactgctttttttgcatagtcgcgcatttctgcagtgaatttacgataatctagttcgccttttgcgattttagataatttttgttcccaacgcgccgttagttctggggatttcaaatcttcggggactaattctagcaattggcgtccttttgaagtaatttgaatgtccttgccttgtttttctaaggagaaactattgaaaagtttttcgatgatgtctgcacgagttgcgactgttccaagtccaccagtctcacccagtgttttggccaatgccttgttcgttgtttccatgtatttagacgggttttccatagccgaaagtaaagtcgcctcatcgaatcttgctggcggttttgtttttcctgtctctaaattgattcgtttaactgggatagtgtcgccttttttcattttagttaattgatctggttcgcgcgactctccgtaaatacttttccaacccagtgatttgacaactttaccttttaaagtaaattcttcttgaccgattttggctttaacagaggtttcttcataaatatatgggtctgaaagcactgctaaaaagcgtttgacaacaaggtcataaattttcctttctttatcgcttaaatctccgagggaaacgggttgctcggtcggaataattgcgtgatggtcgctcactttgctgttatctacaaatgatttgttcgctttgattggttttacgctgatttgacgagcagcttttgcattttcgcccacaccgcaggccactaaacgttcttttagtgttgggacaatgtctgttgaaataaagcgcgaatctgttcgtggatacgttagtactttgtggcgctcgtataatgtttgcataatattcagcgtttctttcgccgaaaaatcatatctattattcgcatcgcgttgtaactctgttaaatcatataaacctggtgagaaagttttcttttctttcatagaaacgtctgtgattaccgcattttccccttgtaaagactttactagtttttctgctaaagctttatcaaacgtttgcccattgttccacgtgaaactttcttgttcggttagggcagtaattccatagtattcacgcgatttaaagttacgaatttcttcctcacgatgttgaatcattgcaagcgttggcgtttgcactcggccacaggaaagttgtgcgttatatttcgttgtcaacgcacgcgtagcattgattcctaccacccagtcagcttcagaacgagcgactgcagagtgatatagattttcataagctttccctggttttaagtgttcgaagccttcacgtatcgctttatccgttacagaggagatccatagtctttttagaggcttcttgattttcgcataatcaataatccagcgagctacaagttctccttctctacctgcatctgttgcaataacgatcgtggttatatctgtacggttcattaacttcttaaccgtttcatattgttttctcgtttgcttgattggttctagcttcattttctctggaagcattggtaaatcttccatattccagtttttatacttcgaatcgtagcgctcaggatcagctagtgttacaaggtgtccaagcgcccaagtgactacatattttccaccttctaaatagccgttcttaccttgtttagccccgagtacccggccgatatctttaccgacagacggtttctctgccagtactaatgtttttgtcatctgtcaaaaccctctcttctattttatttcgatgcctcttgttgcagtacagccaagaattctgcaccgtatttatcgcgtttcatcgcaccaatgcctttgacttcaagcagtgcatcttccgtttgcggcatatatgcacacatttcacgtaacgtttcatctgaaaaaatgatatatggcggcactttgtgttttgctgccagttcccgccgcacttcccgcaatttctcgaaaaggtcactattcacatctattttaactttttcagctcgtttcgcttgttttctttccacttttagctcgcctcgtaaaaccgaaacggctctatccgtcagttttaacgaagggaattgactatcagttggttgtaaatatttttctgctgtaagataatcaattagttgtaacacatctttttgggaagcatctttcatcaatccataagtactgagttcatcaaagcgccaatctttcactttttggtctgcggaacctgtcaaaaccttggcgattaatacttttccgaaacgctctcccattctttttatacaggaaaaaacttgttgtgctaaaatcgtaatatctgtggcttctcttgtatctaagcaattactacattttccgcagtttggctcgtcgtcaccaaaatattggacgatatatttctgcaaacaaatttctgtataaccataacccgtcatttggcgtagcttggcgaattcattttgtttgcgctcatcgtccatttcggattgttcaattaaaaactgctgaatgcggctatcttgcggagaaaatagcaaaatacaatcacttggaacgccgtctcgaccagcacgaccagcttcttgatagtacgcttcgatattacgcggaatattataatgaataacaaaacgcacattagacttattaatccccattccaaaagcattcgtcgccacaatcactcgaatatcatcgtatagaaacttctcttgccagtctttccgtgctaaatcggtcattccgccatgatacataccggattcaacaccttttttttgcaaaaaactgtgcagacgctctacttctttccgagtcgaagcataaataattccggattccgttacattttttgttaaataatctattaaatatttatctttatcttgccctttcactacttggaaagctaaattatctctggaaaatccagttttaacgactgaatcagcccttatttttaataatcggcaaatatcgtctgaaacagcctgcgtcgctgtagcagtaagcgcgataacgagcggacgcctggtcattttatccaaactatcgcacaaggtcaaatagctaggccgaaagtcatgaccccactgcgaaatacagtgcgcttcatctatggcaaataatgaaataggcacctgctcaattaaacgctgaaaacctggcgtttcaatgcgttctggggcaatatatagcatctttaactcacctgaaaatgcagcatccagtcgaatatctatttctctattagtcagtgtactattaataaaagtagctgcaatcccttcggagactagcgcatctacttgatccttcataagtgaaattagtggagaaacaacaatggtcaaaccgtcaaaaagaagtgctgggatttggtaacaaagtgacttcccgccacccgttggcatgattgctagcgtgtcttctcctgcgcaaagtttcgaaataacgtctacttgtccatttcgaaaatcttgataaccaaaattttgctgtaaaatagctcttgcttgctctatcattatcttttttcacgcctcctctatagaaacagtatagcggttttacgaccttaattgaagtcttttggggaaattcgtgttttctcgcagttttcttatttttatagtagaaattaaaaagcagaaacctcttttagaagagattcctgctttttcgactttaagaaatactataatttggcgcttcttttgtaatttgaatatcatgtgggtgactttcacgaagtccagcaccagtcatacgaacgaacgccgcttcttcgcgaaggtgtcttaaatctggtgaaccagtgtaacccatacctgaacgaataccgccaactaattggaagataatatcagcaacggagcctttataaggaacacggccttcaataccttcaggaacaagttttttcgcatcagcttggaaataacgatcttttgaaccatgctccatcgctgccaaactacccatacctcgataagttttaaattgacgaccttggaaaatctcagtttcaccagggctttcgtccgttccagcaagcatacttcctagcataactgcatttcctccagcagctagagctttcacgatatcaccggagtatttaatgccgccgtctgcgataattgttttaccaaattcacgtgcaacagtcgcacaatcataaatagctgtgatttgcggaaccccaacacctgcaactacacgtgtcgtacagatggatccaggaccaatcccaacttttacgatatcaacaccaacttcaaaaagagcacgtgctccttcagctgttgcaacgtttccggcaacaattactacatctttgaaagtttgacggatttcagatattttattaataacgcctgctgaatgtccgtgcgcagtatcaattacaatcgcatctacaccagcttcgattaatttttcaacacgaacaaaagtatcattcgtaattccaacagctgctgctgcaagtagtctaccatgcttgtctttagcagagttcgggaattcaattactttttcaatatctttaatagtgataagcccttttagaatgcctgcttcatcaacaagtggcaatttttcaatgcggtgtttttgcagaatctgctcagcttgttttagcgtagttccaactggcgctgtcactaggttttcctttgtcataacatctttaattactgtagaataatcggaaataaaacgtaaatcgcggttagttaaaatcccaactagtttgcgctctttctcgttgttcacgattggaacacctgagatacgatatttacccatcaaatgctctgcagcaaaaacttggtgatctggagtcagataaaatggatcaataataacgccactttcagagcgtttcaccttctcgatttcttccgcttgttgttcaatactcatattcttatgaacaacaccgattccgccttggcgcgcaattgcaattgccattttggcttctgtaattgtgtccattccggcactccaaattggtacatttaatttgagtgatggagccatttctacacttaaatctacatcatttggtaatacgtccgatttcgctggaacaagtaaaacatcatcaaatgttaagccttcttttgcaaattttgtttcccacatgggtcgcaaacactccttttttattggtactcgcttttttatatagaaaaaacgcatcatcttatccttattttcataaagaaaaaatggtggaaaatatccacatcatgcgacttgtcttctataatcatgctgaaatagccaatgtatatttttagttattgaatatgatgttacaagaagcttggagctatgtcaagaaggttttccgttgttgttttattcagaaaatatagtaaaaaatgtttcacgtgaaacatttgaaaaagccgcctaagattgttatcttaaacgacttcgctatttattaatttgttgtataacttcaaattttcttcatcgaaacaaacaaagcgtatttctttaatacttgtgtcatactcttcttccgcccatttacgaacggtataaagcgctacttctgctgctagttttttaggaaagccatatacaccagtagaaatattaggaaaagcaatcgaagttaagtcttttccggccgctaaatctaacgctttccaataacaagatgccagtttattcgcttcttgatgctctccatctttccaaatcggacccacagcatggataatgtaagttgcttttaaatcacccgcagacgtgatgaccgcctcacctgctggacatgagccgatgcgattaataacctcttgacattcttttaataaatccggccccgccgcttgatggatagccccgtccactccgccgccacctaacagcccggagttagcagcatttacaatgacgtccacttcttgttccgtaatatcaccttttacaattgttatttccataccatcacctcttttcttcattctaatttattttgaaggcgatttccagcaaggcgattatcttcgtttgctggttgcataactgtaattgccttcataaacggttaattgtttattctctagccaaatcacttttgaacagagctgatcaataaaatagcgatcatgtgatacggtaataattgtgccactaaatgcccgaatcgcttcttctaaaacttcacgcgaagcgatatccaaatggttagtcggttcatcgagaatcagtgtgtttactggcatattaataaattgcgctaacctaagtcgcattcgttcaccaccgctaatgttccttactttccggaaaaccatctccccataaaacatgaagcctgctagcatttgccgcgcttctccttctgtcacagcaaccttatctcgaaacgcgtccagcacggtcatctcttcattcagctcttccatttgctgagaaagtgatgcgattttcacactcgcaccaaccttaatcacaccatcatcaggaacaactttcccttccattattttaagcaaagtggatttcccggcgccgttttcaccgataatagcaactcgttctccttgcctaatttgcaaggagacttcttgtacgattgttttttcgctgaatgacttgcttaagttttccataaccacaacttcttggccacttcgaccggcttcatcgaattgtaattgcatttgtttttgcgttagcactggacgttttaccttttccattcgttctaatgcgcgttccatattttttgctcggcggaacatggcatcgtttggcggattagcttgcattgcccactggcgtaagcgtttgatggcttgctgcatctttttaattttcttttgttggtctttgtagtcttgaaattcgcgcaatagtcgttcttctcgttcttttaaatatccggaaaaattcgtatgatagacaattaattcgcggttctcaagctccaccattttctcgactacctcatctaaaaagtagcgatcatgtgacaccactaacacggtccccgaataatgttgtaaaaaagcggtcaaccattctactgccattaaatctagatggttcgtcggttcatctaatagtaataaatctgttttctgcaataataaatgggctaatgcagtttttgttttctcgccgccgcttaagtctccccagctttgcgacagtagctttccaataccaagcccattcaccactttattcaaattggcatccatctcatatccaccaagctcgccaaataatgccattttatccccgtaacggttcattagtttttcgcttgcattcgttgccatttctgcttctaatgaacgcaattctttttccatatcctctaactcgccaaaactagtccgcaaataatgttctactattatattaggatccacgctcgacaattgctctaaaagcccaattctcgctccctttttactcgttacaatcccgctatcaacgccctcagtcccttttaaaattttcaaaatggtacttttcccttcgccattacgaccaattaaaccgacgcgctcgccttcttctaattgaagagatactttctctaaaataatatctccggtaaaacttttaactacctcattcattgctactattgtcattttatcctccgtttatccaaggaagcatggcaaaatgtttcacgtgaaacattttttcagacaacaaaaaagcgtcagacaagcgcccgacgccaattataagtataatactaatttagcactatacaaaccgattgcgtgactccatgcttctctcattttttctcgttatacagttttttgggcagacttcgccaatgtaactgcaataccggaaaaaattgcacggacaatatacaaaaatttagctatactagttcgcgcattcaaaagaaacatgtcatctcacctcttttcattaatacatatagaataaaggatgctgccccaaatgtcaattgttctcccaatcacatgcacgaaacacagcgtttcaactcagaaacttataccattgatgtgaaacacgaacccaaagcaccaaaatctatttaccaattagtcgaaaccgtttacattaataaggcaagcaaaactaaaacagactaatcgcacataatttttggaggtgccataatggaacataataagttgaaacctttcccaaaagattttctatggggatcagcttctgcagcgtaccaagtagaaggtgcctgggatgaggatggcaaaggaccatctgtatgggatgaatttgttcgcattcctggaacaacattcaaagaaacaaacggagatgtagcggtggacaattaccatcgttataaagaagatgtcgcattgatggctgaacagggcctaaaagcatatcgtttctctgtcgcatggagtcgcgttatcccgcatggtaacggggaggttaacgaagctggactgaaattctatgataatttgattgatgaacttctttcttatggaattgagcctgttgttacactttaccactgggatattccgcaagggcttcaagacgaatatggtggatgggagtcgcgcaaagtcgtagaagatttcactaactacgctgcccttctattcgaacgctttaacggccgagttaaatactgggtaacacttaatgaacaaaacgtatttatctcacacggttacaaattagcgtatcacccacctggcgtttctgacgacaagcgtatgtttgcggcaaatcacaatgcgaacttggcgaatgcttctgcaattgctaaattccgcgagctaggtacatccggaaaaattggaccaagttttgcttacggaccaagttactccattgatgccaacccagcgaacgtgttagcttctgaaaactccgaagaattcaacgcccatttctggatggatgtttacacatggggtgaatatcctactgctacttggaactggctggaagagcacggtcttgcaccggaaatcttaccaggcgatacggaacttctgaaaaaaggaaaacctgatttcatgggagttaactattaccgctcaatgactcatgcatttaatgggaaagacggcgttggttctgggaaaatgaacacaactggcgaaaaaggcacttccgaggaaactggtgtaccggggttatacaaaaacaccaataatccttacttagagaaaacgaattgggactgggatattgatccaactggcttgcgcattggcttacgtagaattactaaccgctataaattaccaatcatgattacagaaaacggtcttggtgagtatgatagcttgacggaagaccataaaatccatgatgagtaccggattgaatacattcgcgcgcatgctctagcaatccaagaagcaatcacggacggtgtagagatgcttggttactgcacttggagcttcacagatttactaagctggttaaacggctaccaaaaacgttacggtttcgtatatgttgaccgcgatgaaaatgatgaaaaagaattaaaacgctataaaaaagacagtttttactggtataaaaagacaatcgaagcaaacggagctaatttagtagaagaacagggcaaataagccttgttctctctctgcttcaaccattttgggagggaaaatcttaatgaaaaaaatattacttgtatgtgcggccggaatgtcgacaagcttactagttactaaaatgaaagcgcacgcaacctctatcggggaagaaattgaaattgaagcattgccagtatctgaagctagtaacgtagtagataaaatggatatcgtgatgcttggacctcaagtccgttaccaaaaaccgcaagtagatgaactcgtacagggtcgcattcctgttattgttatcgatatgaaagattatggtatgttaaacgggaaagccgttcttgaaaaagctttcgcggagattggttaagggagattcattcaaaatagggaggttttaaaatgagtataatgtcaaaatttgaacacggcatggaacgtgttttagtaccagttgcgaataaattgaactcgcagcgccatattgcagcaattcgtgatgcatttattttagttttcccattaattatggctggttcaattatcactttgattaacttcgcagtattatcaccggatggctttattgcaaaaatcttattcctagggaaaattttccctaatttagcagatgcacaggctgtattttcgccggtaatgcaaggttcaaccaatattatggcgattctgattgtattcttagtcgcacggaatctcgccatcttctttaaacaggatgatttgctctgtggacttacctcgataggtgcattctttatcgtttatacaccttacacagtggttgacaatgcatcttacatgacaatcaaattcttaggcgcgcaaggccttttcgttgcgattatcgtagcaattattactggggaagtatttagccgactagctagatcccctcgtttgatgatcaaaatgcctgaccaagtaccaccagcagttgctcgctcttttaaagtattaattccagttatcatcatcactattcttttctctgtaattaactacttaatcactttaatcgctccagaaggtttaaacgaccttgtttacacagttattcaagcgccacttaaagacatgggaactaacgtattctctgttatcatcattgggcttgtttctaacttactttgggttcttggtattcacggacctaacaccgttgcagctattcgtgacaccattttcactgaaccaaacttagataacttatcttacgtagctcaacacggttctgcttggggcgctccttacccagcaacatgggctggtctaaatgacggattcgcaaactacggcggatctggtatgactctaggtttactgattgctatctttatcgcatcccgtcgtgcagactaccgcgatatcgcgaaactttctcttgcaccagggattttcaacatcaatgaaccagttattttcggtttaccaatcgtattaaacccaattatggttattcctttcatcattacaccagcaatcaatacattaattggttacttcttcatctcaacaaaacttattccacctgtcgcctatcaagtgccttggacaactccgggaccactgattccattccttggtacaggaggaaactggctcgcgcttctggtcggcttgctctgtctagccgtcgcaacagtcatttatctaccattcgtacttgtatctaacaaaattgccgcgagtgatgctgcaatggacaaaaatgcaacagcctcaacggaacaataggatgtgacaaaatgaaaattgcagcttttgatatcggtggaacggcccttaaaatgggggtcgttttgccgcatggtgaaattattttaacaaaatcagccgaaattagcggtagcgacggcgaccaaattttagcggaaatgaaagtgtttcttgctgaaaatactgacgtgacagggattgcagttagcgcaccgggctatgtgaatccgaaaaccgggcttatcacaatgggcggcgctatccgcagatttgataactttaatttgaaagaatggctcgaagcggaaactggtcttcctgttgccatcgaaaatgacgccaattgcgccctgcttgccgaaaaatggcttggtaaaggacaagatttggatgattttctttgtttaacgatcggaactgggattggcggcggcattttttccaatggtgaattagttcgcggcggtcgtttccgcgctggtgagtttggttatatgtttagcgaacgtcctggtgctttccgtcctggcaaatatacgctaaatgagaccacaaccatgcttgttcttcgtagacaatacgcggaacttactgggcgccctttggaagagattactggtgaagaaatttttgctaattatgatgcgcatgatgccgtttcggaacgacttattactgagttttataccgggatttgtacggggctttataatttaatttacctgttcgatccaacgcacatttttatcggtggtggaattacaagccgccctacttttatcgcggagctaaagcatcatatggagagctttggactgcgtgacacaattattgaaacagcaacacataaaaaccaagctggcctactcggcgcagtgtatcactttttacaggaggaaaatagacatgaatgaaatggaaacagttatttttggcatgattagccaagttggttctgcgagaagcagttacttagaaggacttcgtgcggctcgtgaaggcaatttcgaggaagcagaagcaaaactaaaagaaggcggcgaaacactcgcaaacgggcaccacgagcatcataagctaatccaaaaagaagcttccggtgaaaaagtggaaattcaattacttttaatccatgcggaagacttactcatcacaacagaaacattaagagaagttgtcactgagttcgtgcatgtatataagaaaatcaactaataaaaaagcgtgtaggcctcgaaaacctacacgctttttgttattcttcttgttcttgattataatttttcttcgccatcgcttccagtaaaaacagcaccggaatttgcgtcgtaatattcgtcttatcaaccatttcttgcgttacataatacggaatattaacatcagataagcccgcaagcgtgttgtggctcgtattagtaatacttataatccgactgccatattgttgcatattttgcgcctgctcaagcacttgatctgtttcgcctgacacagaaagtataatcatcactgctttatttttaaattgctctcccgggttgggataaaatggatctttaatataaaacgtccgctttttcatattggagaaaaaacgactgccgtactctgctaaaatccctgaagtcccgattccgaaaaacacgactaaatcagcttcattgataatttccgccgccgcgtctaacacatgatcataatcacgattcattgtccgttcaaagaattcctctaaaacttctactgtatccgccgtttttttcttcacttcacgtgtcgcttcttgttttagcttcactttaaattcagaaaaaccttcacagcctaattttcttgtaaatcgaacaatcgaagccggcgaaacgtgcgtcacttccgaaagctcgcgcactctcataaacataactttgtcccgattgtccattatgtaccggtataaatgatgctctgtctctgtaaattgcctaatcacttcatacgaaaacataagtttattcacctcatctgtatcagtatttcccgggaaataaaaacaggcgaccgcttcgcattatgcaatctaggtcacctgtccgtgtccatcttcttataaggatggaatatttttctttttcttcacatagaaacgtagggcaataataattgcaccaccaactgtgttaacaatcggacttaacgctacattaatatttggaggaattgtcacttgtacaatcgtcattacaaacatccataccgcaatgactccgaccgctactagtaagtattttattgttccacctttttgaccagcgcgcatgttagaagcgtatttacgcaagataagcattgcgaagccaccgacaactgcagtgattaataacacgataattcctaaagtctgtgcatttttttggaaataagcactaattcctgaaatcagcatcatcgctccaagtacaaggagtccaccgtcaagtactagccaccatttatccgtgttttgctccactgtagcagctttcacatctaaagaaacaacatattctgttggtgttaaattaaataattttctcgctgtgatgccttttttctgttcggctaaaatcttttcactcatttcataaacaataatttcttgttgttcttcgccgtaatgagtttctcgcaaatgcttttcgacttccataacatattgcaagttccgcttcgttaaattagctttcaattcagctaattgcggtttaatcgtttctgtttctgtcgtcaatgctaaatcctccctcgctcattctatcctctattataccggacttgcctactataaaaaagctatttttttaattcgttttagacaattggaaaagcccacgcattttgtttaaaatgtagagtgccaaaataaaactaccaatcgtcgctcctattccccaagctaaatagccaacgaaaccaagctctgtatctgtcaccgccaaattagccgcagtcatcccaacaaataacgaaaataacactaaaaacggccatttaacccaagaaaatgcaaataaataaccacttcgttcaatgtgctgcttcttatataagattaaaatagcaacgaccatgagtacacttaatattacgctaaaaatcacagccccaaacgatgcggactcaaacgaaaacggagaaaacacattcacataatcctcaaatcgtagcagtttagacatccctttatctccgccatgtggccaaataaagttatacatattatctaaagtaggatttaacacgttcggcagtaacatcaccccaaatgccacaaaagccgcggcaattggcgaacctatcaataaaccaattaaaatagctactaaaaatataaggatataagtaaataatccaccaactatatccacccaaaattttggtgcatctagttgaatatattcttttggaacatgcgacatgaagtatgtcaaaccaattcccattgagataagataactcagtccaatggtcgctattcccataatcattttaaccccaactatgtgcgtccgtttatatggtaatgatgcagtaaaacgatttgctcttgtgtagcgctcgaaaataacggccaaaacccctaaaataaaaacactcactttaatcaacgtaaaaaacatttctacttgaaaataaaacataaatggcatgtaatctacaaactcgtcttgaacaaaatttgtatacattggaaccgttaaatacgccactgtcaaactagctttcatttcctcatcagaagttttaaattcaggattttctttctgttgctttaaaaactcacttgattcgtagtactctttttgactattccatctatctgcgtctgacattagtcccaaggtaattcctaagaaaaatagtatcacaacacccaaaagcatccatctcatattacgccattcccggtaccataaccctcgattaaacattattagccttgtccctcccgtctgttttaaatctcgtaataatctattttatcatttgctaaatgcaccgtgaaaatgtcttctatcgaaatagacatctcttccagcaaaaccggctcttctaaacgtaattcagcaagaaaactgctggcattttcagtcaccagaagcgtgtaaatccgcccattacgatacaataattgcgcgttatttttcacaaaaccaggtatttttttcgttttaaatgcaacttgtattttcactgcatcggtccgcatatcttctaaataataatctagttccacgctcgcaccctttagaacaatcactcgatccgcaattgcctcgagttcttccaaacgatgagatgcaatcactacacttgttcctcgttttttcaccgtgtcctttatcgttgctaaaatctgctttttaataatgatatctagcccgtccaacggttcatctagcagcaagaatcgaacattgagtgaaaaagctaaaataataaaaaataaggcttttcgtccttttgaaaaagacattagcttagccttcatcggcagttcaaattgctgcattaattcattaaaaaaagcctcatcaaaagtcgtataaatttgccgatatatcttaacaactgtctgtacactgtatgtattaaaatggttcatattatcttccaagaaaaacagctgttgcttcacttccgggtgtttaaaaatactctcttcatctaagaaaacatcgccctcatcaggcaaataaattcccgtcatcgttgaaaatagagttgtcttcccaacgccatttcgaccaattaacgcggtaatctcccccgcttttaaatcaaatgaaacatccttcaaaaccaagttatcgtccatctttttagttaagttccgaattttcattattccacctctttcactcattatataagctctggaatattttttctacatttttaaaaattttctaccaattcgctataaaaagttacaaaccaatcattatactaatttcacatattgcggtaaaatatccctatatgaacttatttaaaacccctgaggtgaaaacatgataaaacttgatatgaccatgcttgattcttttaaagaagaccctaatctccggaagcttttattttctggacattttggtttagaaaaagaaaatattcgcgtaacttctgatggaaaattggcccttacgccacatccagctatttttggtccaaaagaggataacccatatattaaaaccgatttttcggaaagtcagattgaaatgattaccccggtgacggactcgattgactctgtatatgaatggcttgaaaatcttcataatatcgtttcgctgcgctccgaaaacgaactactttggccatctagcaatccgcccattttaccagcggaagaagatattccaattgctgaatataaaacacccgatagtccggacagaaaataccgcgaacatttagcaaaaggctacggtaaaaaaatccaattattatctggcattcattataatttctcattcccggaagctttaattgacggattatatgccaatattagcctcccagaagaatcgaagcaagattttaaaaatcgtctatatttaaaagttgcaaaatactttatgaaaaatcgctggttgcttatttatttaactggcgcaagtccggtttaccttgctgatttctcgaaaacgaagcacgaagaatcccttccagacggtagtagcgcgcttcgtgatggaatttctcttcgaaatagtaatgctgggtataaaaacaaagaagctcttttcgttgattacaattcattcgacgcttatatttctagcatctctaactatatcgaagcaggcaaaatcgagagtatgcgcgaattttataacccaattcgtttgaaaaatgcgcataccgaccaaacagtcgaaagtttagcggagcacggcgtggaatatttagagattcgctctattgacctaaatccacttgaaccaaatggcatttctaaagacgagcttgattttattcacctatttttaatcaaaggtttgctttcagaagatcgtgagttgtgcgcaaataatcaacaattggccgatgaaaatgaaaataatattgccctaaatggcctcgcgcagccctcaataaaaaattgcgataatgaagacataccactcgcagatgctgggcttttagaactcgacaagatgagcgacttcatcaaaagtctgcgaccagaagacaccaaactccgagcaatcatcgaaaaacaaaaagaacgtctgctacaccctgaaaaaacgattgctgcacaagtgaaacaacaagtaacaaaagaaggctacgtggacttccatttaaaccaagccaaaacttatatggaagaaaccgaagctctagcctacaaattgattggcgcagaagatatggagctttccacccaaatcatatggaaagacgccattgcgcgtggcatcaaagtcgacgtattagaccgagctgaaaacttccttcgcttccaaaaaggcgaccacattgaatatgtaaaacaagcgagcaaaacgtccaaagataattacgtttccgttttaatgatggaaaacaaagtcgttacaaagcttgtacttgcagaacacgatatccgagtgccctttggcgatagttttagtgaccaagctcttgcccttgaagcattctccctatttgaggataaacaaatcgtcgttaaaccaaaatccaccaactatggttggggaattagtattttcaaaaacaaattcacgctagaagattaccaagaagctttaaatatcgcattcagttatgatagctctgtcattattgaggagttcattcctggcgacgagttccgcttcttagttattaacgacaaagttgaagctgtactaaaacgtgtccccgctaacgtaaccggcgacggaattcatacagtgcgcgagctggtcgaagaaaaaaacacagatcctttgcgcggaacagatcatttgaaaccacttgaaaaaatccgtactggtccagaagaaactctaatgctttccatgcaaaacctttcttgggatagcattcctaaagcagaagaaatcatctaccttcgcgaaaactccaacgtcagcacaggtggcgatagcattgactatactgaagagatggacgattacttcaaagagatagctattcgcgctacacaagtacttgacgccaaaatttgcggcgtagacataattgttccacgtgaaacaattgatcgcgataaacatgctatcattgagctaaacttcaacccagcgatgcacatgcactgcttcccttatcaaggagagcagaaaaaaattggtgataagattttagatttcttatttgactaaaaaaacccagctacagtttagtagctgggatttttgattactcttccaatccaatttcaccatttgaactaatcacatctttataccaataataggatgctttctttttacgcgaataatcgccggttccatcatcgtatttatccacataaataatgccataacgcttggccatttcccctgtagatgcgctcactaagtcaatacaaccccaaatagtaaagccaatcaaatcaacaccatcttgaatcgctttatgcatttgaagaatatgctctttgaaataatcaattcgatacggatcattaatcgtcccatcatcttccaatttatcaaaggctcctaaaccattttcaactaccataagcggaatattatagcgagtatataagtcattcagcgcaatccgaagccctacaggatctgtctgcattccccaatcatttgtttttaaataaggattttcagcccctccgataacactttttcccgaatttttataggcaggatcgttggatgcacaaagcgttagataatagctaaatgtgtaaaaatcaaccgtgccttctcgcaaaatttgttcatcttctggatcaaattcaagctcaatgccattatctttaaaaaacgtttttgcataaaaaggataataacctttgacatgaacgtcgccgcagaaatggctgtgcattgcttccgtctgcttagctagcaaaacatcggatggttcgcaagtacgcgggtagcgtggcatataagcaatcatgcagccaatcatgaagtctgggttgatgctatgtcctagttttaccgcttttgcgctagcaacaaattgatgatgaagcgcttgatatctcacttttgggtcatctttttgatgaagaaaatccccctccgcatgacgaatcccaagcgataaataattcccaatttccattgttgcagtatttatttcattgaaagtcaaccagtgttttactaaatgtttataacgtttaaaaatcacttcacaaaaatgaagatagtaatcaatcaaatctcgtgatgcccagccgttcacctcatttgttaatgctagcggaatatcaaaatgagcaatcgtcactaacggttcaatctgatgttttttcagctcattaaaaacatcttcataaaactgcaatccttcctcgttaggctctgcttcctttcctgttgggaaaatacgagtccagtttattgacatccggaacactttaaatccagcttctgccattaacttaatatcctctttataatggtgataaaagtccactgcttcatgacttggataaaaagtggattcttctaattgtgcggtaattcttcttggctctgtatgcgttccaccagtgaataaatccgcacaggcaagtccttttccgcctaaattataaccgccttcaaactggttagccgcggtcgccccgccccacataaagccatctggaaacttcgtattactcattttgctcactccttaattccattacttgattacctttcgttacaataccattctctttagcttctaccactgcgtattcattggtatttgtaattaccatcatcgtggttgtatcatatttttctgcaattttttccatatcaaacgttactaataaatctccttgttccactacatcacccgtcgcaacatgtgccgtgaagtaattaccatcaagcttcactgtatcaatgcctacgtgtaataatatttcagcgccattatctgacttcatagcaatcgcatgttttgttttgaaaagcgaaatgattgtgccgttagctggagcataaagtttaccttcatttggtttaatcgcaatacttttacccataatttcatcagcaaaagtagtatcatttacttggctcatttttactaattcaccagtaacaggagcttgcaaaatttctgtccccgctgctattttttctgctacaggcgttgcttctaccatttgctcatcaataccgaaaatataagagaaaattaaagctacgataaatgctaaggccatcgcaattaatgcataaacaaaagtatctccgacaagacctggaagtcctggaataccaccgttaccagttaagacatacgcttttacaccaaacatcattgcaaagccgccaccagcagccccaccaattaacgatgccatgaaaggacgtttatataccacgtttatcccgtacatcgctggttccgttacgcccattaatgcagttaaaccagttgaaaatgctaatgatttcagttttttatcttttgctcggaaaaatacaccgaaagtcgctcccgcttggctcatattggaaatataagttaacggtaaaaatttatcataaccatattttgctaaattactaataacaaatggaacaattgcatagtgcataccagtcataacgataatggccatggcaccaccaatcaagataccaccaatagctccaccattatttaataaccagttaattccgccagatacaccgtctccaacaaatgtacctagtggtccaataacaacaagcgtcaaaggaacaacgataaacattgtaattaatgggacaaacagcaattttaacgaggttggaataatccgatccacccatttttccacataagacataatccaaattgcaagtaaaatcggaataacagagtaagcatacgtcactggagttactggtaacccgataaagtgtggcgttgtgcccgcactaagtaaagcagttaaatccggataaagtagcgccgctccaattccaagcgcgacaaacatattcgctttaaagtaacgcgcggcacttacagcaactaaaattggcaagaagtaaaataccccgtcaccgatagctaacaagatacggtaagtttctgtatctgttgctaaccaaccaagtgaaacaaataatgccatgaaacctttgattaaaccagctcccgcaatcgcaggaagaattggtgcaaaaacgcccgaaagcgcatcaaaaatatttgagaaaaatcctttgattcctttttgccgggtcgttttattcgtcgtttctttgtttttccaagcaggattttctgctgctaatgcgtcaaacactttgggtacgtcatttccgataattacttggaattgattccccgcaacgttcgtccccatcactttatccaaaccttttaattgtttttcatttactttcgattgatcttttaattgaaaccgtagtctggtaatgcagtgataaacttcatttacattattttttccaccgactgcttgtaaaatttcttttgctaactgattgtagtccatgctaatcctcctaaatataatagaaaaacctgaatgaaatgcacctaaaaaagcatacaatcatccaggtattgcccgcaaatcgcggtaacaagcctattggttattttttctttttaaaagccgttcaatatgaagtgcgagataaaactgttccgaatgactcatcgtaaattgataattcttttccaaaaacacgccaattttatcaatacagtcgaaaataacgcctctacttttcttcaccgtttgataaagaaattcatccatttcgtcaattgtctcgccaataattacgcgttgacagaaaaacttcagatgggtcataaaacgataataattcgtactttcttcatcaaattcgatgttaaaatgatatttaataatagagataatttcttgaattaactgcataatgtgtgtgacgtcgttcatatcactatctacttccgcattaacaaaatgtagcgctatattagaaatttcagcatcgggcagctctatttcaagcttactttccaccattttagcagcctctttggccactgcatattcttcctgataaaagcgtttcacttcccacgagagtggattttcgataaccacattttcttgcaatcgttgcgtggcaaagtacagatgatccgaaagagaaatatagatgacatcactaatatctttcgctgttttcattttgaataacttcacaatatcatcagttacttctaaaaattgtattggaatttcatttacaatcattttaaacttatccattgtatcatctttcaactcaaaaactttttcgattttcgattcattaattggatcaccaactttagaattaaagccaagcccctttcccaaaatcagcaactcctgcgcatcctcgctaatcgcactcacaatattattatttaaaatcctctcaattctcaaacaaatcaccacctatttgaagcaaaataaaaagagcaataccacacatatcagccaaaaaactaatatctggtattgcccgcattaccggtaacaagcctcatggatatagtaccaccatatgaaatcgctgtcaatgggttttgttaaaaccattctacccttaactattttcgattattccccctaggtaacagtatcttatttgtaattaaatttaaaatgaaatagattaaaacaaaggagccccaatagataaacaagttttcatatccaagcaataataccctaaagaaaattttatgaataagcaccactaagagtattaatagactatttactatagaaataccgataattttcatcttatttcgcctccttcaatgtaaatgattcgatctgcttttgcagatatttctgggtcatgcgtaacacaaacgatagtcttaccttgctttttcaaggctaaaaataattcaatgattttttgtttgtttttatcatccaagttgcctgttggttcgtccgcaagtaacagttgaaatggtttgagtaaaatgcgcacaatagcaatccgttgtttttctccaccgcttaattggtatactttttttgctaaatagctctcatccattcctacttcttctaaatgctctatcatcagcttgcgattttccccacctgtaatggataagttttctaacactgtttcattttccatcaatagataattttggaatataaaacctaacacctctttttttagagtcataacctcttttttcgtctgatattccatctcgttaataataacttgcccactatcttttgaatctaggtgtccgataacatttagcagcgtggtcttcccactaccactctcgccgacgactgcaataaattcaccagctccaatagaaagagagactttttccaaaatcaatttatcttgtatctttttactgacattaactaattcaatcatatttttcaccttttagtatggctttaaaatctttataaatcgctttttcctttatgaaataaatggcacatagttctattatgagaataacaacgctaaaatatagggcaactggttctttgctaagaataaaaatgaggattccagaaaaaacactcacaaacaaattgcttataataaaccatttactacttttccaaaacgaatagccaaatacatgataaattagttgcttatataggttctctcgataataggacagtacaagaagtaccataaaagagcataagcatagggctaagataatcgtacctatcaattgctgatatatttgccatttcaaagtagttatttcgcttgaaacttcttgataaacactccttacatgggtaatttctcttgcatttgaattactaataagtggtaagatagcgttaaaagcgtcaccattcgatttatcaacaaaatatacagaagaagttacatgagcgccaatactagatgagtcaatatttcccgtatatacaatcgcaattggatccgtgatgtttccagtcctaaaatccccagtattactatcataggaaaaataatcttgattattttctgcataaataatattaacccttaagtcttccttacttagcgctacagcaggcaggtctaaagcttcgttataaatattcgccacttctactttttgaaaatagaagtaatcgagaaaagtgttttttatatctttctctagtcccttcttactattaggaacaataatattcaaaactttatcactgattatcgcttcttttcccacgttctgaccttttatacttttaatcggatttaattttaagtaattaaaatcaatttctacgctattaccctcaggtgagtttatttcagagccctttttcaaataagtttcatagaaaaaagtattagtttcacttcgctgaaaattattcgaatacattaaaaacatctctttcttagatgtaccttcttcataaaaagcacttaaattgtcgtttagctctttatcagcttttaagtcatcttggatcccctcaggtaaaacccctacttttactttaaaaatgtcctttgtagcttcccatacatcaatattagctagtcttgtatttaatgtctgaagtgattgataagaagcaataaaagtacctataaataagcagagcagcacaaatttaataactagattgattgccaaatgctgtcttgatgattgcatacgctggtctgattttgcttgatcaattttctttattctaagtaatccaaagaaatacattggaaacagaataaaaataaataaaagtacattaaataaaagcaacttccacactatctccactaagtacgtggctagcccatttgctaaaacaatactaacaaaagttatcagaattgctaacacactaaacaaagtaaatattatagttttattgaacaaagacattaatgtaactaattcagaattcccccatatacgattaactaataaccgttgtttagagtatcttaaatagtaatatgtaaaaacaaacaaaatagcaaaacacaaaagcaaagtcataagtaacgggatattaatatatttccaccagctcacgtcaacacttttcgtagttacttccccgtactgttcaaattcctttaagaaagcctgataagtattctggttatctaagccacttacataaaaagtatcacttagacccacatttttaatttgtccaaagtcataaacctttaaagaccaatacttagaaggatggtaaatcacacccgattgttttttgtcaacactttcctcatttgccaaaaactgatttttattgggataatctcctttctttaggtttatatttggcgcaaattgacaattagagccataaatattcaaatcgcgttcacctaaaaatgtatactgcgctatattaatatttttcgtttctgaaaatgtcttaatagaattattaaaatccgaaacttggtagtcctctttatacttaaactgcactaccgtttgctctttaaaaagaaaatcacgcgacaaagtattgctaataaagttaaaaaacatgacattaccaatgataagcgtcactaaaataataatagaaagaaactttttcattacaccatccttactttaatataaagctaagaaacggaaatatttcttagctttataggaattattttgtagcccaattagctttattaccccataatgatgacttaatccatgcagtagctagattattctttgctttccagctacttctttccgtcgctctatagttagaagcgcttgatctatgcgtttttttagtatgctgataatttgaataatgtctatcttgtccccatgtaacccagaaagtgccgcctccagctgattgcgctgcttttaatagaggtttttttcctgttgtggtctcagaaaaaatcactttttcacctgttttatttgcgctcattaatgaatctaagctagtctctccttcatttagattttgagcagctaaagcgcccatcggtgataacactgtaagcaatgctatcgctaaaacacatacttttttcttcattgtattctcctctctttcaaattaatatttatatttcataaccaaataaacaggttagaatatatccttccctacgaaacctccaaagttttaattttataatattccaactattcccaatgtaacacaaaaaagtaatgtataaccaaaaatgtaatgaacgactcaattcttatcctaaatggctaaagttatagtgtcttagtgcattttctacacatatcgtgttacaaaaacttcattttcagaataaaaaaagagctagacagctctttatacatgtttctattcagcatcaagcttgatagtcacaaaagtttcatatactagcttaactttaactacatttatttgaacttgttcacttaaatgctgaaatcatgtaaatatcattgtatatttattcaatcgtccaccaacactttatctttccgcccatatatactacaataaactttaacgaaaaaacggaaccctctccgtttaaaatagaaaggggtgactacatgaatttttacgagcgtataaaaatcatggtcccaccatttccctgtgaaggatgtttttttcccagataaataaattattcaggagagttttttatggaaaaaaacatcgaaacaaagaaaatcaatttggcattacttgtttgccttgtgggatttccacaaattagtgaaactatttatacaccttctttaaccgaaattgctaagggctatggggtatcgttaaacctggctcaaatgactttaagcatttactttcttgcttttgctgttggtgtcttcttttggggcgttagttccgattttttaggtcgacgaaaagcgatgaactttgggatattcatctatattcttggttgcttcgcctgccttttttcaaataatattacaatgctttttatcggacggtttgttcaagcattcggcgcaagtacgggttctgttacaacacagaccattttgcgtgacaactaccacggaaatgatcgccaccatttatttgcaaaaatatctgccgctttggcattttcaccagcaatcgggccattaattggtgggtttatcggacaatattacggctttcgcgtggtatttttatttttagtagttatgggaatgatattgctgttctggagtttaaaacgactaccagaaacaaaaacagtgaacgctacctcctttagtgtgcagaaaatcgtcgtaattggtaaaaaaatgatatttgaccgctatacaattgcttttggagcgctaattggtatttttaatggaatattgtttagttactactctgaagctcctacaatttttattgagaggtttcatttaaatcagagtcagtatggctttatggggtgcgcagtggctatggcaactattttaggtgcttggctatcgaactggcgcctaatgcagaactcgcctcataaaatcattaaagaaggtattttattagccattatcggcacattagctcttagcgtggtcgcgatttttccgctaacgaaccaagttatattgtatattcttttcatctctattatcttggcaggaatcggcatggctttaccaaattgcttaagtctagcactagtgaaatttcaagaagccgccggtacggctagcgcatttttaagcttaggttattatgtaattgtcagtctttgtactttcttcattggcgttttgcattcgggatcaatgcttgtatttccctcattctgcctagtattacttctaattgccttgctttgtataaaaatagctactagaaataatcgctaacaaaaaattggcaccttttctatcttgaaaaggtgccaattttatttaaatgtcatcacaatataaagatactatatattttatataacttgacctacgatttatatttcccggggaataaaaaagtattaaactcctaaaagtctaatacttctctgattaagctaattgttcgttcatactttccatttgagcaaggaaggctttttgccatttcttttcattaaggaattcaactggaaactgaggatcaattgtggttaggattttagcccatgcatctgtacgtaatgaagatgcttggcgaatcgctattacaaacattattattgttccggcaattaaaaataaagttaaaataatacctacaataattgtagctgtgatatttcggtttattccaaaaaagtacgttagataacctaaaataaatgcgattacaaaaaacccgccaataaaaataaaggttttcttacggctacctctataagtagaaatacctagtgctacttccaataatgccatttgacgaaccggattattcttctttgcaacttgaataccatatttatcaattaataaatgcgctgcttttctttcctctttgttattctttggcataattactagaagaacaacaaaaaatgctataaccattaactgtatcaaaaaaacactcctataataaaatttatagttaattatagcattattctactctacacaaattgtatattttgtgaattaattagcgcgtagaatctaaacaatcctgtatatatattgacaaaatcgcttcacttagtatattcacaatttaaatccgttcaaacactagcttgatactattttgaagtatatcattaatgcagtttttgtgaatcaacttaaaaaaacaatcttttgacacacttactcgtcaaaagattgtttcacgtgaaacatattaaacgttaaagcggaaatgaacaacatctccatctttcatttcgtattctttaccttccaagcgtactttacccgcttctttggccgcttgctctgagccgtattcaagtaaagcgtcatatgcgacaacttcggcacgaatgaatccgcgttcgaagtccgtgtggataatccccgcacattgtggagctttcatccctttgatgaaagtccaagcacgaacttcttgaacgcctgcagtgaagtaagtcgctaagccaagcaatgtatacgcggaacgaattaactggtctaaaccagattcttcaattccaagtgcttctaaaaattctaatttatcttcgtcttcaagctcagcaatttcctcttcggcacgcgcacaaaccacgataacttcagagttctcactcgcagcgaattcgcgtacttgttgtacatatttgttatcgtccggactagaaacatcttcttcacttacatttgctacatataaaactggttttcttgtaagtaagaaaaggttgcgaacgattttctcttcttcttcgttaaattcaatcgcacgagctggtttgtcattttcgaatgcttcacgtagtttaactaaaacgttatattcagccacagcatctttatctttttgtttagacagcttctcaacgcgtccaatacgcttctctactgtttctaagtccgctaagataagttctaagttgattgtagaaatatcgtctagcgggtctactcggccttctacgtgggtaatgttttcatcgtcaaagcaacgagttacatgacaaattgcatccacttgacgaatatgggataagaatttgtttccaagtccttcccctttactagcaccttttacaattccggcgatatctgtaaattcaaaagttgttggaacggtctttttcggttttacaagttccgttagtttgtttaatctgtggtcaggaacttcaacaattcctacgttcgggtcaatcgtcgcaaacggataattcgcagcctctgctcctgcttttgtgattgcattaaaaagtgtcgatttcccaacattaggaagcccgacaataccagctgtaagtgccattatatataaactccttttcgttaacttcattttgaaaatgcccatcaaatagacattttttcactaacgtatattataaaggtttttcaaacaaaaagccacccaccaaaaaacgaaaaccctttaatcagcaaaggatttccgtttttaattatttcatttctttccaaatagcaatcatctcataagctacatcgcgtaatgtatatgttgtcataaattgatcttccgcgtgcatgaagaggatagaaatttgtacgtctccaccatctgcctctttttgaattagctgcacatgatttttatgaccttcgctaagaaattcattagcctcatcaatttttttatatgcttctgtgaattttctttgtcttcccaatttcatcgcctcaataatgcaacttcttgcggcgccaacagaactaattatttgaaatgatgcgagttccattccttccattttcgctagcctcctatgattgaaactcgccctgttaatttagtatcagaacttccaccaacgaaaatttctataccaccgggctccacctcatatttattgttaattgaccatatttcaaaacttgatttatctaacttaaatgtcactgtagttgtttgattcgctgcaatacgaacctttttaaacgcttttaattctttttttcttctagtaatgcttgcttccatatcatgaatataaagttgcacgacttcttcaccagctacattagagatgtttttcaaggttactttcacctctacagattgcccgccaaggagttctgatatttttatagattcttgttttatctgtaaatcttgatattcaaaagtgctataacttaaaccataaccaaatggataaagcggcttaccagttaaatcaaagtagtcttctttatactccactgccttttgattatagtaaataggaatttgcccagaagatcttggtatgctgaccggtaatttacctgatggattgtaatgaccgaaaaggacctcagcaatcgcggtcccaccaagacttcctggataccaagcggtaaggattgcatctgctgccaaactaatttcaggaatagcgattggtctgccttgaatcattacaacaattacaggctttccagtacgcttcattgcgtaaaacaaatctaattgcggttgtggaagcgtgatatcagcaacatccacattttcacctgcatccatgttcgggcctttagagcttaccgcgccattatttaaaaattccatgtcaaaattccgcgcgcttgaaccaccgagcaccataacaatagcatctgcctctttagcaaccacttctgctctttgaatgccatccggaagctcttcacgaatttcagcccctttttcagaaaggacttcccaattttcaggaagctgattttttattccttctaaaacagtgacacattctgattcattttgaggagctgtatagtctccaagctgattataaagcgaatctatgctaggacctacaacagctatttttttcggttcgcccactaaaggtaatgtttcgaagtcgtttttcaaaagacaaataccctctctagcagcttgtaaatttagttgtctccaatcagacttcggttcttgaatgtcttcttccacaaatggttgttcaaatagacctaattggaatttcacttggagcactcgacttacagcgtcatcaacgatcttttcatcaaggattcctttttccacgctttcttcaagaaatggaaacacttcatcccacaaactcaaatccacaccggcttcaagagccattttcgcggcttttttgggatcaggatttagttttaataatctgtcaagggcacagccatctgccatgacaatcccggaaaaacccatttcttctcgcaaaatagttgttaaaagctctttgttcgcgtgacatggaaccccgtcaatctcattgtaagctgccataacgccaagagcgccacttctaattccagcacgcattggatccaagaaaatctctctaagttcccttacaccaatagaaactggtccagaattatgcccaccaatcggctcgccttgtgctgcaaaatgttttaaaataacagcaattttcccgctcgcttgaaaaccttcagtaatcgccgctgttaattccgctgcaagatatggatcttcaccgtaacactcttcggcgcgcccccatctcgggtctcgaagtacatctaatgctgaagcaagtgctagatgaactcccttttcggaaatttcttctgtaatcgcacttgcgacctgtttttgcaactctggattaaaagaagcagcacgagctaaatttacaggataagattcgctatctaacgcttggtgaccgtgcggaacttcctcagctaataatacaggaatccctaggcgcgtattttctatcacatagcgttgaattttattagctactttgccagcatttttccgacttacacccgtgtccttattcattttggaccatggatcagcgcggaacagaccgtataaagcgcctataccttcaaatctagttacttcctctttaaatttttccgtgatttgaaacgtttcgccatctcttgaaaaagcttcccagccatacattctttggtttagttgaccacatttttctgctaaggtcatcttggaaagtaagtcttctacacgttctgaaactggtttctccttatccaaataaacagccatattctttctcctccttgctaaaaaactaggatttttatagtaaactaattgctaaatctaatactttttcaccattcatacggccataatcaacgatatcaataactgccaccgatacattatcaccaactgtgtctattactttatctttcatataatttacttgcggtccaagtaaaatcgcatcagctttacgccaatttttttcgaaatccgtttctgaaatagcccagatagtcaattctaaattacgttcttctacaacacgttccattttccttactaaaacacttgtagacattcctgcattacacatcagcataatatttttcataaaaatccctccaattaggctttaattcggtcattggcttttaagaatggtagataaagaagtacgcagacacctatcaagaaaatttggaatactgcagcgcgccagtccccacctgttgcaaggaagccggaagcaaccactggtgtcgtccacggaaccattacaactacctctgaaatcatatgcagtttcgtcgcaaagtatgctaaacataaacaaagcggagttgaaataataaacggaatcattaaactcaagttatatacaatcggaagtccaaatactaccggctcattaatgttaaagagaccaggagctgccgataaagtagctatttcgcgataatcttttcgttttgaccaaataaatattgctaataataacgcaatggtatttccgccaccacccataacgccaaaaacatcacggaaagtagtattaataatatgtggaatctctgtatgattcgcaaatgctgtcatattttcttgcatatttgccaaaagaactgggtccataattggccctaaaatcccacttccagcaataccaatagaataaagcatttgtgaaatcgtcattaacgttaggaaacctggaacgcttgtaactaggaacgttaatggctcctgaataatcgcgctaattaaggaatacaaattcaagctgaataatgtcactactaagaatgaaataaatgcaaaaataagtattgttaacattgtcggaataagcacattgaacgatttaattactgctggaggtacgctatccccagaaatatgaatcttcattttctcactcttagaaagacgaatgaacacttccgttgcaagtagtgctgttacaatcccaacgaacattcccgctgaacccatcaaggctattggcaatactccagcaacttccacagatttctctgcaccaatcggcacaatttctgtcacagctgggataaaaataacaatcagtgcaatggtcattaatgccggtgcaaacggattttcaaacttccgattttgtgctaaaaagtaagcaaccgatgccccaattaaaatagtaataatccctaaagtcccgtttacaatactgttacctagcccttgccaagtcgtaagtgtttcggaactgataatcgccgacataaaaccatccggcttaataataacgttattaattaaaaccatgaatcctgctaacataataaaaggtaaaatagtagcaaatgcatcacgcatagactttaaatgaatttgatttccaagcttctgcgataaccaacttaatttctcgatgaactttttcaattttttatacctcctttgatattacaataagtgtagcgctttctttttgttaaataaatctagtctttttccgcatctgtattttacatgcggaaataaaaaaaggcccgttaacttttctctctaaaaaagtctaacgaaccttttagttataacgtttgtagcacacgcataaattcttcaaaacttgtcacacgttttagctctcccattgcttttggactttctactaaattgctaataagctcatacaccgtcgcaagctgctgttgttgcttgttttttaccgctaacatgaaaattacttgcgcctgatcttcctcattccattttacccctccgccaacacaaatacatactccaatagctgtttcctggacgtttgcctcaattgggtgcggtgccgcaagtccattacctaaataagtcggtacaatttcttcgcgctcaaaaagtgacggtaaatagtcctcgccaacaatattattttccagcaaaagactcgctaaatttacgagaacttgctctttatcctttttatcactaattaagaataacgattccttaaaaaccttgtccacttcaaattggttcttcgtctcatcttgcttcatcaaagcagtaatattacgaatatccgcctttgtcaaaaatggtgacacttgaataaatgggtgcaatttcattcgcagtggtactgtagagataacaaaatcacacatcgttccactctgctcatattctttaaatgagtacactccgactatttcaagcgtattctcaaactcttttcgtactttagattccaaaagttgtgacgtccctaaaccagaagcgcaaacaattaacactttttgcttctcagactctatttctttatctaaaccatataaaaagtgaatagccaaataccctacttccgcttcgtccacatttgtttttaactcctgctcaaggacttctttagcaaccaaccctaattcaaaagctagtggataattagcttttagattttttaaatacgggttttgtatattcatattaaatttaattctgttaatagctggctttaaatgcaatgcgatatttgaaatcattttctgatcctgcttaaaatcataaccatacagctctttaatcttcgctaacatcttatccacgatgatatattctcggtaattattaaagtcactttttctgtttttcgaactaaggtgtagcagcagataggcagtctcactttccgggaaacgaattccttctgaaagatctatttcttttataataccttgagccgcccttagttctggcatactaaattcaatatcctccaaatctgttgcaggtacataacaattatcttttacacgacatacagcaattgcgatatgaataatcaaatttttaactgaaatgtccgtcatgtgaatattatatttcgctatattagaaacgacaatctgctccatcatttccaaattaacttctccaaaaaaatttatttccgtttctgtaataagcgggcttgtagattccactaacaaataccttgaaaagcaaaatcggatagcaagttctgcgccagtaattctaattccatagccagctcgtttttccactttcaactcattttctttgagttttcgtttcacttctaaaatatccaagtttatcgtagacttactaacaaaaagctcttctgacaacgtctccagctttacatagtcatttttaagtaataaatatcgaataatataatctgctctatcctctgcaaacatcggcacgatattcatattagctcttcccaccgaatcatccaaaagagcttcacgcagcgctttttcatcaccaatgaccagacgatatcctacaccaggaagtgattcgattctgtttccgcctatcgtcagtatttgattaattactttaatatcatttctaattgtccgagggttaacagctaaagcttcccctaattctccaccactaataaactccatctttaaataaagcatatgaactatttgtttccatctaggtaatgataattttgaagcactcacgcagctccactcctcacgacaattaatttaagctatttcatcttgattataagcctatcacctgataacgacaagtcttccagaaatagtagcaagtatttcgataaaaagcaatatcgttaaaaatgcctttactccaaccttctagcccaaaaagtttcacgtgaaacataaaaaagcgaaaaccctaaaaaggattttcgctttcacttattttaaatcagttacatgttcttcaagattaataccagttcccgcagccactcgactagcgaattccggatctacttgatagaaattacgtaagttgcggattttaatatcctcacgtacttgtgaccaatcatcgacaatgtttttcacgagtgcagcacgttctgcatttgaataacgatcccatacttcttttgcatggccaaagttatttggtttttcagcaatcaggcgcccagaaatatcaccacggatttcttgctctggttcgataaacgctggattttcttttggttccgtatcataactatttggctcataattaatcgaacttgtttgttgtttaaacggcatatgaccgtcacgttggttgttcgcgacaggcgctttcgggctgttaattgggagttgtaagtagttcggccctacacgatgtctttgcgtatctgagtaagagaataaacgaccttgcaacaaacggtcttcagaaggaagcatcccacgtacaagtaccccaggattaaaaccaaccgattctgtctccgcaaaaatattatctgggttgcggtcaagcgtcattgttcctacgtgttcataagggaatacatcttcaaaccaatcttttgtagcatctaatggattgaaatcaaagctatctaagtctttcggatccaacacttgcacatataaatcccattcaggatagtctccattttcaattgcttcgtacaaatcacgacttgcatggttaaattcttttgcttgaatttgagaagcttgctccgtcgaaaggttcactattcccgcttttggaacccagcgcagttttacataaactgttttgccttcttcgttaatccatttgaacgcatgaacactagagccccggacttcgcggtaagaagccggcgttccttcatcactgaataagtacataatcattgtcgtagcttccggtgtaaggctaaagaaatcccagtaacgattgccatcttgaatatttgtgcgcgggtcaggcttcaaggaatgaataacatctggaaacttaatcgcatcacgaatgaaaaatactggcaaattatttccgacaaagtcataatttccctcttccgtataaaacttaacggagaaaccgcgtggatcacgtaatgtttctggagaatgttgcccatgaattactgttgaaaaacgagcaaaaacctctgtttccgttccttcttcttgcaaaaatttagccattgtatattttttcatgctttttttagtaacaaatttcccgtgcgcaccagcaccacgagcatgtacaaccctctcaggaactcgttctctatcaaaatgcgccaatttctcaataagcacataatcttctatcaaagtaggtcctttacgtcccgctgtcattgaattttggttatcaccaactggcacaccttgattcgtcgttaaattttttctatctgtcatatgtatatacctccataacaattctatatcatttttatttataataattattaaatgatactatttatattttaaagaagggagagacaaacttcaactaaaaggcttataaaaagcaatctcttaggagagattgctttttatcatttaaagaacatgtatatataaatcttcactaacttgcgtgagattaatgttatttactcgctcaatcatttcgatataattttccggtattgtgggggacattccaccgcaaatccccgcactgatagctccaattgtatcggtatcccaaccaatgcatgcactcaatttggccgcttctactgggtcaccttttgctaattcaacaatagcgaatgcgcagggaatagtttcaattgtttccattcctgagccgatttcttcatatagtcttttcagtgcagtcgctggtcctgtttcctctccaataatttcgcgagccttgtccattctaaattttaacgacgctgaagggaaatcatatccgtaattactagcaacctcaattgcttcgtaagctaattcccatattttatccactatgttcccacctcgagccacataactaattgcagccgcgacagcacttgcgccctgaatagcaattttggcattatgtgtaggcaggcaaatttgatgcactttggaaaccaagtcttccatatcttcataattagctattatgccgattggcgctattttcatcgatgctccatttgttgtgccagaaatacctgttttggtgatcggcacgccttctgagatttgtttcaatgctctaagtgtggaaggacctgagacgaactccgaaacacctgaattagcgttccattcgactaattccgcgacatagtcttccacgcggatttgcccattattttttttaatcatttcagcaatcatcaacacatttatcgtatcatctgtaatcgacccagccgccagttttcttccaaatgcatcactttcgtcggaaggcaagagcgtttcaaccccattaggataaatggctcttatcttttcctgcgaccaacattctgtcggcattcccattgcatcgccgagtgctccacccgctaaaactccaaaaacccttgttttcatcaatacgaaacctccatatcattagtagcttttccgttaaaaggtattaacgtcagcattttcccgccttgtttcacagttgttttttcttcagaaataatatctaaaaagtcatctgtgtttaaaataacgactaatacttcggatttataacctttgttttcaattgcttcaaagtccacatttacaagtgtttgcccttgtttcacctttgaccccacttccacttgcacatcaaaaccttctccgttcaactccaccgtatcaattccaatatgaattaaaatttccgttccattttccgtagtaattccaagcgcatgtcctcccgggaacaccgtagtaacaacaccggctgcaggagcaaccactttacttcctgttgggaaaataacaaccccttcacccatcgttttggaagcgaatgtctcgtctgctgaggatgaaattggctgcatcgtgccagcaattggcgctaaaacttcttgttgcttaattaaaggtttagtctcttcgtccactacatcctcactagatttaaacgtaaagaatgttagcgagaaggaaaccgccatcgttacaatagttgcaaaaatcgctacatatagcccgcccagactactgtttgctggattaataaacgatacaaatccgagaaccccaaaagcaaaagcatacatttttacggagaaaatcgagataattaatgatccgacagctcccccaatcatagagaatgcaaaccgttttttcacgggcaaactgaatccatatattgccggctcgatgatacagaacatccccgatatcatcgcaggtatcgcaagtgctttttgatttctagaacgagttttcaagtaaaccgcaagcaccactgccgtttgggcaaaacttgctgtaaatgacattgggaaaatatagtccactccatactgcgccaagttgttaatcccaattgcactcattggccagtgtaacccaaatattactaacggttgataaagtagcccaacaactaccgatgtaataaccggtgaaacctcataaagtccagaaaccccagctgaaataagcgagctaagtacatttgtaactggcccaataattagaattgctaacggaaacgtaataagtattgttaaaaagctatttaaattatgcgccaacaaaggaggtacaatttttttcaatattttttctaccttcgcacctaaaaaagtgataaaaattactggtataactgtgtactggtaaccatttggtgggaacagaattggtattccaaaaaacgtattatataccggcgttgaaaacatcgtcccatcaaacaatgtataaagcgctttgtctgttacaagatttgtcattagttcaggtattacgagcgttgccccaagcatcatccctacataaggattcaaattaaacgcttttgcactcgtgtagcctaaaacaacaggtaaaaagtaaaacactgcttgccccatagcatggagaacaatgtagccgccatcgttgacatcaatgacattggtaatagttaataaagcaagaatcccctgcaataaacctgaagctgttaaaatcccaagcacaggcgtgattacttttgtaataatttcaatcaatcgattcaaaccagtctttttaacttccgcttccgctatcttgtctgcgccagtcacaccttggatttcattgtagacatccgaaacatgggtcccgataacaacttgaaatctacccccagcaaattgagccgtcataatctctgaagactttttcagtatatcttcattgacctttgaatcatccttcaacgtaaatcttaatctcgtcatacaatgcgtcacacttagaacgttctcttttcctccaacattttccagtatgaatttagacaacgcttgatacttccccatcctattccaactcctttttgtgttttggatataaaaaaggcagtactcaaacaagaggaattgtcctcctatttgggtactgcctgattgctcagttacattccctattatttaattaggcgctgaacatgtagcgttaaatacattaactcttctgcataaaccgtacaattcaacgtttcttgaatatagtcgctaataatttggacgctcgcgtaagcttttggatacagtttgaacacctgctcaatcatgtcaggctcctctttttcccgtgcgccttcactattaattcgctctataaagaatcttaaatgcgtgataaaccttagataattcagtgactcttcatccagttttatggacaaagtatcttccagaatcagtaataccttcttcaacacctctgtcgttataagcgtattattgataatcccttcttgctgcccgttaacaaaatgaagtgcaataaatcctgcctcatcttccagtaacttaacattttcataataagaaatggttttaacggaattcttagctgcgttgaattcttttggatagaattttttaatttcaagaagcaaagcattttttatttgatgaccacttttataacgactaatcgcataattaatatgatccgccaaaccaagataagttaattcatcaaaagtaacgtttaactctgactccgcatcttttattattttattcgttaaatctagatgatttatgggcacttccttgataagctggacgaatctttccgtaatttctggagaatcaactataaatgttttttcaacagcctcttcagaaatgatatttcccactcgtttattgaaagaaatccctttaccaatcactatcttttccaatccatttgaatcatgaaccaagattgtgttgttgttaaatactctcttgactcgaagcaattaaatcactcctcttggttacgcttacagacaaattataagtatggcggattcaaaagtcaagcttatattttaaaaaaacatccctttccccacctaaaaatgggattttattacccttgacacatgaaaaaagctacttatttttagaaataagtagccgatttttatttattcttgttcagctttaactaaaattttcttcacttttcgttcgaattcgcgtcggggaatcatcacactatgaccacaaccttcgcacttaatccgaatatccatacccatgcgtataatcttaaaacgattggtaccacaaggatgcggctttttcatttccactacatcgtttaaatcgaaatgctttttttccataaacatcacaacctattcatcatcaaactgaatatctaaaatctctaaaatacgatctaaatcatcatcagataaaaattcaatttcaattttaccttttttatcgcgacgtttaatcgaaactgccgtaccaaatttatcacgtaattggctttcgctttcacggataaagataggaactctagctggcttaattgtttcacgtgaaacattttcgtttagattgttcacaacatcttctagttggcgaactgttaatccttgcgccacagcctttttcgcagttgggataatatttttcttgagttttaaacctaataacacgcgcccatgtccggcagataatgaaccatcacgcaacattacttgcacttcttctggcaatgttagtagacgaacaaagttagcaatatatggtcgactcttccctactcgttctgctaattttgcttgtgttaagctcaattttttcataaggaattggtaggattccgcttcttccaacggagataaatcttcgcgttgcaagttttcaataacagaaagctccatcatctcttcttctgttaaatcgcggacaacagctggaatttcttttaatttagcctcttttgctgcgcggtatctgcgttcaccaacaacaatttcatatcctttatcagtatttcttaaaattattggctgcaaaacaccgtgaattttaatagagtcacgtaattcattgattgcttttgcatcaaagattttacgtggttgatatgggtttggcttgatttcttttatcgcgatattttgaactgtttcttcgtttgtatctacattattaaatagtgcattgattcctttacctagacctttagccatgtgcaaccacttcctttgctaattctaaataaacttcagcacctttcgattttgcatcatataacaaaatcggtttcccatgactaggcgcttcacttagacgtacattccgtggaataatagtattaaatactttgttttggaagtattttttcacttcttctattacttgaatgcctagatttgttcttgcatcaagcattgttagtaaaacaccttcaatttgtaaatcctcatttagatgtttttgaacgattctaattgtgtttaatagctggcttaaaccttctagcgcataatattcacattgaacaggaattaaaacagaatctgctgctgttaatgcgtttaaagtcaaaagcccaagtgatggcggacaatcaataatcacatagtcataatcatcacggattgagtcgattgcttttttcaatctaatttcacgagagatagctggaactagctctacttctgcacctgcaagttgaattgtagctggaataacatttaaattatccaagtctgtcttttgcaacacatcttgaatggctacatcatcaactagtacatcataaatacaatgttcaatttcacctttattaacaccaacgccacttgatgcgttaccttgtgggtcaatatcaactagtaacactttcttacctaaaaaagctaggctcgagcttaaattcacagatgatgtcgtcttaccaaccccacctttttggtttgctagtgcaatcactttgctcaatctttttcaccaacccttattttgtaccgagatttccggttcttttatcttctattctaccaaaagattttcatttagtcttacaaaaagtaaaaataaattgaaattcgtattttgaaagcttaaaaatggtgaaaatggtattcttaaaactagaaatgtttcacgtgaaacattttaaaataaaaaaagcaaccaacctaagctgattactttcctatcttcaatccacagagaatgttgccttaacgcctagaactgtgcagactttctgatacattctaagagttaaatccggatctccagcttctaaacggccaataatgaccggagataaatctgatttcaacgctaaatctagttgcgaccattttttctccattcgtttagaaaatatatatttaccgaggcttgccgaaaaactttctaagtaatgggcaataccttcattttctaatgctttatttttcagtgtttcaaattggtaatctgcgttaccaatgcttgtttctgcttcaattcgacgcaagaatacacgttttacttcctcgcggtacgagctcatttgatccgtgaacgggtttttatctttaaaatagcctttaacgaagcaataataggtttcatccccactaaatgcagtgaagtaaattaaacgacaatttttatctttaaaatgtgctttcatctcttgaatcggttggtcaacagttgtttccactcgagttgtttgcagtgaataagcttgacttttaccgatgattaaatggacatcgggaagaatttgcttaccagtgctaagctttcttgtttctgctgtttctatttgtaacaggccttgaaatactaaagtggccattagtggttcttccacaattaaattttgtaagaaatcatacgcttggaactcattttgttcgtctttcacaaaaatgatttttgccattcgtttcgtgattccacccagagttgagtgaatcactccctcctttacaactttacctaattctattgtacttttttctgttcaaaattgcacttattttctctagtttttacaaaataaatcaaatccactcaaattgagttgtttttattttttgaaaataaaaaacccgcttcaataagcaggtttcacaactattttttaacttctttcgctatttggtaccaactgtaaatcttcactatcgcaaagaaagtatagccaaatgcgatgagatatgccccgtaattaactaataaaatgttaaagccacttccccaaccggactcttctgctacggcaactgctcgggcataaggactggtgaaaaagtaggtaatatatagtggattaaaacttaaaatagcacttgtaatcgctattacgaaagatggaagtaccatcaaacaactaatgacaccaactgcatgtccaattatcttcaaaaacctcactgctacacctcttatttctttttaggaatttgaatggtaatttgataaaaatcatctgtctcttcttcggtgaaatctaggtccattccgttatctttaaccattgtaaccgattgtttaatcgtgttcatagcaatacgcacgtcacgactaatagcttggcgttttggtttggtttttttagtagctacttgttttttcacgcctaaaatttcttgaatccttgcttcggtttgtttgacgttccagtgattttcggctatttcggctaaaagtgcgacttgttgttcttctgtttctaatgcgagtaacgaacgagcatggcgttctgaaatttgtttgataagaaccgcttcttggacagtttcgggcagttttagaagacgcattttgttggcgatggcagactggcttttcccgacacgttgcgcaagggcttcttgtgtcacgtcctgcatgtctagtaaactccgatatgctttcgcttcctcaattggcgtcaattcttcacgttgcaagttttcaattaaagcaatcgctgctacttcttcatcatctaaattttgaataattgctggaattttttccatttctaaagaaagcacagcacgaaaacgacgctcgcctgcaatgatttcataataatccggttccatttctctaaccacaatcggctgaataacaccgtgaattcggatagttcgagcaagttcatcaatcttatcttgatcaaatactgtccgtggttgaaattggttcgggaaaattttatccataggaagttcttgtacgcgttgtactccttcttctactatatcatccatttgattcttctctttttttccaaataaacgtgaaaaaggcatctgggtccttcctttccggaacatctcggggtttcttaatatattatctagctatccgcaagtctcttaaactattttagcagaaatgctagagaaaaacacgcttattctgtcgtttaaatgtgaaaaaatagatagagctgctaaagtttcacagtcctatctattttcttaatgaaattcatcggtaacagtattgatggttttttccatattgtcgcggtaagactcattttgtagcaacatcatggaaataatatccatcacatacataatcgaaaactggctattagcaaaataccttttacttacgaataaagtattgtaaaccggaatagtgacgtcgctgatttcggtcatttcactattttcaaaacttgtaaatgtagcgactttacttttgtttttcttagcgttttttagtgcagtaactagctctggggtgttacctgaattagaaatgccgataacaaaatcttcttttgttgtaatcgagctagtaataatcatcatatgcggatcattgacactgatgacgtttaaccccattcgaataaggcgctgcgacatttcaacggcagtgagtccagaactcccgacgccgcaaatatagactcgtttggcttcttgaatatactgtacaacctcgcggattttggccggctcaatcagcttcaccgtgttatcaatcactttatgataaaacgaataaacttcttcaaaaagatcatcgtaaccaagcgacggaaccattgtggctgctgtgttaacccgcattttcaaatcaacaaaactatcacaacgcacatgacggcaaaacctcgttatcgtcgaaatggacgtaccagtttcttcggctagctctttaatgttaatattcttgagttcatcacttttttctaaaatatacttcgcaatttgtttttctttattcggtaatcgattgtaattttgttggatttcatttaaaatcgtcatctttttcggcctctttctggtttaagaaatgatagagtgcgccaatcatcccagcttcatttcccagctttgcgaaagtaatatctgctgtatcgaacatcggcgagattaatttggttgagatagccgcttttagacgcggtttgaagaatgactcttcttccattaatccgccaccgagcacaatcacttctgggttgaaaatatagattaagtttactacaccttctactaaattctcaatccattgctctatttcagccagcacatctgcatctccgctataggcccattccatgacttgacgaccatttaacgcattttcctcgatattttttcgcgaggctacttgtttaatcaatgcttttgttgaagccacatcttgaaatcttccttgtgaaaggtgcatatagcccacttcacatgctgtaaaagacgatccatttattagtttgtcatttagtaacatggctccgccgattccggtaccaattgtcaaacagagcacgctcccacacccccgtgctccacccaaccaaaactcgccaagacaggctgcatttacgtcattttccactgcgcacggaagattaaatcggtgctctaattctgcttttatttcagttcctgtgtatttgggaatcgtgtagccagcataaataattttgcctttcacagaatccacaacgcccgcagaggccacacagacgcccgctacatccgttttttcttgttcaacaatccgaataagcgcgggcatgatttgattcgctccgccagttataggcgtcacacaagacttaagttcccccacccgtttaccttcttgattaaatttagcgtatttaatactcgttccaccaatgtcgacacaaagataattttccatttcttcacctctttagtgaaattattatccttcttttgttaattcatcataaaatgcttggcttgaatttgcttcgattaaacgggttaccttttcctcatccatgagtacttctgcaagctctgacaacacttctaaatgactttctgaatccgttgccgcaagggtaataattagtttcactgggtcgaacatgtcgctgccaaaagccactccatcagccaatgttgcaaaggttaagccaccgtgaatgacgccaaactctggtcgtgtgtgcgctaacgcgatatgtttagcgatcactatatatggtccattattttctacactttgaatcattccatcaatataactctctttgatagcgcctcgttctagtaaaagtctcgctgacatttggatagcttcccgccagtcttctgcttttaaatttacctcaatatcctctaaagttactcggtccaataacatgcccgtacccccttatttattatattcagccattatttctgttaaatctacctccgccagcgactctcgctccaaatagttcggggttaaatcactatgttttgttacttcatttggaatgacaagaacattgacacccgcactgtttcccgccaaaaggccatttcgcgagtcttctacgataagagactccgacgccttaacatccagcgctcttaacgcttctaaaaataaatccggttctggcttaatccgtgtaacatcctccgccgtaataatagcatcaaaatattcgagcaagcctagtcgttccaaatgataaagtggttttggtcgctgcgatgaggtcgcaagtgctaactttaatccacgttcttttaattcacgaataaaactttccacgccttctttggctggtaaacttttactattttcaataaaagttgcttgtgtttctgcttcgaacacttgtcgattaatatccatttgattcttctcatttaattcacggaataaatcgtccacattagatccgacacactgtaaaaactcctcgatagaaaggtcgtaattttgcttcgttttaaaccattctttaaaaatttcataccaaactacttctgtatcaataacaattccgtcaaagtccatcacaatcgcttttaacattgtcttcctcctacccgttttactattcaaagcgctcctaaaaagaagcgcttacaaataagttaattcttttgttctcggtctgcaactattttatctattagttcttgatattctggtgcgccgaggtaatccgttatttctacataatacgcatctggttgtttttctttggctcggtcaataagtgatttatgcgtcacgaccacatcgcattcggtcggcaattcgtggatggcgatatggaacactttaatatcctctaagccagcatttttgatttttttctgtagcaccgtcgcgcccattgcactggatccaagccccgcatcacaagcataggcgattcttttaacatttttaaaattaaaatcatctactggagcttcgaaaacagaggaaatactactttttttgcctttaagaccttccattttcttcgctgcatcttgtagttctgagtctttgttccccatgcgtttaataaatggaatggcggtaatgaatgtgacaagggccgcacatagcaccgcaataaggattttaatgtggtcgccgggtgctgccatcatcataatggtgataatactaccaggagaagctacaccaacaaggcccgcatttgtcattgttaaaataaatgttcctgtcataccaccaagaattagcggtaaaataagaattggattcattaaaacgaacgggaagtaaatttcgtgaataccaccaaataggtgaataacacttgccccgtaggaagatgcttttgagttacctttaccaaagaacatatagccgagtagaattccaagtcctggtccagggtttgattctagtaagtaaagcactgatttccctgtttctgcgagttgcaaggtggctagtggactaagaataccttgaccgatcgcattgtttaagaataagactttagctggctcaatgattaaagccgttagtgggagcaaatgattgttaattaacacatccacgccacttgctaatacttttgttacagcttcgaccattggagcaattgccacataagaaaatagtgctaatcccgctccaattatcccaatcgaaaagttattaactagtagttcaaatccagctggaatttttccatcaatacgttcatcaaattttttaagtatccaagctgcgagcggacccattatcattgcgccgataaacatggttatatccgaactaataattgcacccattgttgcaacggtaccaataactcctcctcggtaaccgtgaactgctcgacctccggcaaaagcaataagaagtggtaacaagtaattaagcattggtgcgataaacccttttaacatctcagagcctgtagccaccccaattgccgttaaaataccccaagccataaaagctcctaaattcggaatgaccataccacttagcttactcccaaacttttgtacatgtacccgaatagacatatttccccctccaatcatatgtgtggcgctattttatagtgatacttcttttccttcagcaatggaacgttcaatcgcatctactactcgcaaggaatcatacgcttctttaggtgtaataattgattttgtattattcgcaacattattaataaatgccattacttcttctgccaaatctccggaaacttcgccatttgtgtaataccagtgtcttgaatcaggataagacacccctttttcactaacaaaacgaactccgtggtcacaagagtctacatatgccacgccttttgttccgactaattctagcttgtcatcaatgatggttggcgagttttctggtagcacccagcaagcttcaagacaagcaattgcgccattttcgtacgtaacaatggcataaatcacatcattcatgccgtattcttttagcaatacactgcggcttttggcgataaccttgactggctcgctatccatgtaccagttaatataatcaatatcatgaatcattacgtgcatacttaaatcagaagcacctatgtaacgctttggcccggtaattgggctgttacgacgacaataaagatgaataatatcacccaattcgccgttatcgaggcgctgtttaatcatattaaaacgaggatcaaatctgagtaaaaaaccaactgtgaacactttgtcgtagtctttggtcagttcatacattgctttgccgtcttccagttcttttgcaagtggtttttcgagtaaaatgtgttttttgtattttaccgcttcttccacgcaatcacggtgcatattatcaggtaaaacaatgctcacagcttcaatctccgtatttgctagaagttcgtggtagtctttgtaagctttgcactgaaatttctctgccatttcggcgcgtctttcatcgttgtactcacaaattgctactaactctacttgcggaagtttttggtaaatttctgcatgatactgccccatttgtccaacgccaattacgccaactttgatttgctttgtcatatcacttacctctttcttcttgaattttttggatttcgtttgtaaagcgggtggttatttcctgtggccgagttactgcgccgccaacaacaacggcataacaacctaacgtaagaacttgtcgtgctttactaggcgaatcgattttcccttctgcaatcactggacgcttcgtgcttttcaaaacttctttcaaatgggagaaatcgtcgtcgctgatatttttattcgctgtttcttcggtgtagccgtaaagtgtcgtgccaattaagtcgaaaccgagggaatcagcgtaataaacgtcttcaatactagctgtgtctgccatgaaaagtgtgtttggaaactcttttcgaatggcgcttagtatgtctttgaggtcttcgttatgtggtctttttctcgttgtcgcatccatcgcaacaatttctactcccgtttcacatatttctctgacttcttttaaagtgggggtgataaatacgtccgaatcatcgtaatcttttttgtaaataccgataatcggaacgtcaatctcactttgaattgcccgaatatcttttgcggtatttgctcggataccaacagcaccaccttgaactgcggccaaagccatttttgacatgataaatgcactatgaagtggttcgtcttctaaagcttggcaggaaaccactaacccacctttgattttttccataacagaattgcccactgatactcctcctctatactgtgtttcagtgtaaagtatgcgttttcaaacagactatatcataagaaaatgattttatcaatatcaattaaatgaaaatgattttcatgttttagcgtggatagttgcggaaactagctttaaaaaatgacgttgctgttaaaaataaaaagtcctttcgcttgaaaggactttgttagtttattcgattggtaatttgttgggtgttccgggtttgcgtggatatttgttgggggtttcttttgttttcgtgatgacgtagatattgcgttcgctttcttctactggtagggagaaagagaagtgttcctcgacttttccgccaaatagtttgatggctttttcggctgtttgcagctcttgttcggcttgggcagctttcattactaggaacgaaccgccttttttgacaagtggcatgcaaagctcggataatacgctcattcttgctacggcacgtgcggttacaaggtcgtatttttcgcggtgcgctttgttttgaccaaatgtttcagcgcgatcatggtagaaatgcacatcggttagacctaatttttctgctagcgcatctaggaaagtcatgcgttttttcaaggagtctacgatgcttacttttaaatgcgggaagcagattttgattgggagacttggaaaaccagcgccagcaccgacatcacaaatagtatcgaatttagtaaagtctacataaaacgcggcagaaatagaatcgtaaaagtgctttaaatacacttctttttcgtcagtaatagctgttaaattcattttttcattccattctactaacatttcgaagtaatcgtggaattgtttcatttggtcgtcgcttagttctattcctttttcagcgagcgccatttggaattgctctggattcatattttttcctcactttattttcgcgatttttgccgtgtttaggatgttggaacgtgttggtttatacttttaaactggcttataccgtatattttagctcattattttcaagtataagtattttcgtcctttttagcaagttcgtattacgtttaacaattatcaaacttgttggcattctctttaaaactcgctttggcctttgtgacccatttgccttttgcggtagtggaaagcccgtctatgtaactcgtgcaattgctttttatatcttctattttgtcccgcttcatcattttcaacattcgcttgcggttttctgatgcggcgtaggtttgtctagccacaaacatccaaataaggtttatttctaggctttttcgtgactctaacaaatccgctcttaatttatctatcatggtatcaatcacgttcctttttcagctgatgtagttcttcttcataagcagtcacttgcttcttataaagggtttgatgttcttcggactcattttctaaatgtgttactgcattttttaccatccattcgccttcttcttggattgaactgattaaatggtaggcttttggtaaatcttctgatgcgtcataatctcttttttgatagatatatctgatttgttcagaaagattttccagttcctgatgaaaacgccatttttcttgagaagcctcatccatcgcttcgtccaattgacgtctttttctattaaaatcatcctctaaattttcgatttttagcagtagttgtctttgtttatccatacatgctccctatttgtttggctaattcttggtcggtttttagctggctttttatggcttcattgatttgttctagcaacttatcatattcttgctctattttggttgcttcgattaaggatttttcgcaatcttgcactgtgtctatcacaatttccggctcagtcgccccgccccaagcgagtgcggcgagtatttctgactcagctagatgggagccgatatcccttgcatctgaaagcgtatcccgccacaactcttcggcattctcgattgctttatcaaacatatcttttaagtcttttatttcgccttgaatcgtttgtttcattccttgcgtaatcgcgagcccctctgccgcatctaagaatatttcttccgatgaagatagggcaccaccactttttgaaaaactggttcgcatgatattgattgatgctaattgctgggctgttgcgtatttggctaatcgcaagcttccttctttatcggtaaggatatttccatcttcatcgaattgataaccaccccacatatgttgctcaaccataccagcttttttcgactcaacctctattaaatggccaattgtcgggtctccgataccataaccaattggcacataatccttcctatcaataaaattaaataatctatctaaagcgtttattgcttttacggtatcttgttgttttggcgttaggttggagtagatattcgggccttggtagaagaaacccccgctgatgcgtttgatgtcttttttatctaagtctgcgatagcgtactgggcgttcatggagcctagagaatgaccgtatacgtagatttgggcgtttgggtagagtttcatggtttgttttaaggtttctgcggaggtttttagttggggtgttactgtggatcctccgccatttgtaatttggattgcagttggaatatcattacttaaccagtccttcctcacatctttataatctggatgttttggaacattaaggtttccattagccggtgcggtagagcctttgtaaaggattgttatttcttttactttgtttctttcgctgatggaggctgtgggtggcgtgtatttgtctgtgatgatgtaggattgttccccggttgatttgttgttgattttttgggatacgattccgatggtttgctcattgccattaacttttaaaattttgactttatccttaagtttatagtcttcatattctttttgcgccaactcaactctttcttggtcagtaatagcttgactcatttctccccctccttatctcctagaagtttatcaaggttccccgatgtaactgaagcgcctccacttaattctccgttaaaattgttcatagtatattttatatatagttctggatttccgtttataattaaagtaacattgattccgcccattggatttttctttatacttttctgatctatttcatacgattgaattacacctttttctgtaaaagcatctgcatctgcagctttcaatctaaattcaaatacttgtttcgcttcatcactataaactacattcatcatttctttatttaatttctcttcatccatatagaatttcactcctaaaccaaaaatggttattactgtaattcctagtactattatccatctctttttcaactcttcacctctgttgtatgactttttatttgtaggtctattttatcacatgttagaaattttcactttcttttttttcagtcttttgatcgtctcttagctctataaaaactcatttatatccgttcaaaagccccaattgttttgtaagctccttagatatgcttgctccaccactctttaattcttcattatttttcttcaacgtatatgttaatttcaaagcagaatccttgttaataactaatgcaactattattccgcccattggattaggctctatactttccttgtcaacttcatatgattgaattagcccttcttttgtaaatgctttcgtatcaataagttttatatcatcattgaatacttctttcgcttcattgctacaaaccacattcatcatttctgtatttaatttctcttcatccatatagaattttacccctaaaccaaaaatggtcatcactgtaattcctagtactattacccacctctttttcaactcttcacctctgttgtatgacttcttatctataggtcagttttatcatatataagaattttttgccttcttttttcagtttttttgcttatttatttcacttccaaatacctaatagttttgcaagtttttcagagatacttgctcctccgcaccttagttgcccattaaatttgtccatagtatattctatacccatctctgaatcattatttattattaactcgacgttgattcctcccattggattacgcctaatactttctctcactatttcataggagtgaacttttccttcttctgtaaaagcttttgagtccattccttttagatctttatcaaacgcttctttcgcttcatcactataaatcacattcatcatttcttcatttaatcttttctcatccatatagaattttactcctatagcaaaaataactattattacaattcctagtattattatccatttctttttcaatctttcacctctgtttgtcttgcaagttctttagatataattgcgcctccaccgcctaatacaccgttattcctactcatagtgtaagatgcatacaactcagaattattattaataattaacctaacttctatcccgcccattggattggactttatacttccctcatcaattttgtacgattgaattataccttctttagtaaatgcttttgcatccaggtttgttaatcttttttcgaatacttgttttgcttcatcactatagattacttttatcatttctttatttaatttctcttcatccatataaaattttatccctagaccaaaaataatcattattgcaattccaaatagtactatccatctttttttcaaaccttcacctctgtttttattttcttagttgtctaataatttttctaattttgcagaatttccgccaccatcatcaattagttttttgtcatcagctttattcaatgtaaaaaaaacatataactcagaatctccattaacatgcaaagtaacatttattcctcccatagggttttgtttgatacttttcttatcaatttcatatgtgttaattacacccttcccagtcaatgcttcagcatccaaatttttcaacccattttcaaaaactcttttcgcttcatcactataaactacatttatcatttctttatttaatttttcttcatccatataaaatttcacgcctaatcccgcaacaatcattactagaactaccgttgctattatccatctctttttcacacattcacctctgcagtctgtcttcttctatgtaatcccattctaccttaattaaaaacaagaaaaaaccacattattcaacggaaactttcaacttagacggtaagtttgaagttttcgtgaacatgtggtttcagttattatagtaatccgtgttcttatttacttattttcgctatctttccttgctcaatataaactagcaaaatagatatatcggctgggtttactccgctgatacggctagcttgggcgatggaaaggggttcgattttctttaatttttctagggcttctgttgctaggccgctgattgcatcataatcgatattttctgggattttcttgtcttccatgcgcttcattttttctacttgaaggttggatttttgaatgtagccttcgtatttaatttgaatttctacttgttcagcgatttcatcggtcacaaatgtttcacgtgaaacaatttgggcgattttgtcgtaagttatttcgggacggcgaagtaaatctgctgctagaattccgtcttttagttcacctgagccgatttcttttagcatcgcttgaacttcggcagttggtttaatgcgtgttttttgtagtctttctttttctgcttcgatggcactttgttttgctaaaaagcgttcataacgttcgtcgctaattaagccgatttcatgaccgatttctgttaaacgtaaatctgcattatcatggcgtaatagcaaacggtattcggcacgagatgtaagtaaacgatatggttcttccgttccttttgttactaaatcgtcaattaaaacgccgatataagcttggtcgcgaccaaggataactggttctttttcaaagactttacgagcagcattgattcctgccattaagccttgccctgctgcttcttcatagccacttgtaccattaatttggccggctgtgaaaagtccttcgactaatttagtttcaagtgatggccacagttgatctggcattactgcatcatattcgatagcatagccaacacgcatcatttctacattttcaagtccaggaatagttcttaacatttcacgttgcacttcttctggcaaactggtggaaagaccttggacatatacttcttcggtatttttgccttctggttcaaggaagatttggtgtcttggtttgtcgctgaaacgaacaattttatcttcaatggatgggcaatatctagccccagtgccttttttcgttgctgtaaacattggtgaacggtgtaagttcgcttggattatttcgtgggttgtttcgtttgtataagttaaccaacacggtagttggtcaagcaacatttccaccgtatcaaagctaaatgcgcgcggatgatcgtcacctggttgttcttctgtttttgagtagtcaatcgtacttgattttacacgcggtggtgttcctgttttaaaacggcgcagttcaaaacctaattcttccaagtgctctgaaagttttacagaaggttgttggttatttggaccgcttgaatagcgcagttcaccgacaataatttcgccacgtgagaaagttccggtagtaataacaactgttttcgcgtagtaaattgcgccactgtttgtaataacgcctttacacacgccatcttcaatcactaaacggtcaacaagtccttggcgcaaagtgatattttcttctttttcaattgtgtgtttcatttcgtgttggtaatcccatttgtctgcttgggcacgtaatgcgcgaacagccgggcctttacctgtatttagcatccgcatttggatgtatgttttgtctgtattacgacccatttcgccgccgagagcatcaatttcgcgcacaactacgccttttgctggacctccaacagaaggattacatggcataaaagcgaccatatctaaatttatcgttaacatcagcgttttggcacccattcgaccactcgcaaggcctgcttctactcccgcatggcctgcaccaacaacgatgacgtcaaaagttcctgcatcataggtttgcattttataaaaacatctcctaaaaaatcattttccaaggcaaaattgattgaacaactgatcgagtaattcatcctggacagaatcaccagtaatttcacctagtaaatcccatgcacgagtcatatcaatctggacaatatctaccggcataccaagctgaattcctgttgtaacgccatttaacgcttccagtgcttgatgaaggagcgcaatgtgtcgaacattcgatacataagtagcatcaccagcatcaatgtcaccagcaaaaaatagtgttttaatcgcttcttctaaagcctctaaaccttcatcgtttactagcgaagtggagacaattgggttttctccagcaagttcacgcactctatctatatcaagctttgtttccaaatctgttttatttaaaacgaccacataattatgacccgcggctgcttcaaataacgcttcatcttccaccgtcagctcttcattttgatttaatactagcaagataaaatcagcatccgccaatgcttttcttgaacgttctacaccaattttttccacaatatcttctgtttcccgaattccggccgtatcgattaaacgcagcggaacaccgcgaacattgacgtattcttctataatatctcgcgttgtcccagcaatatcagtgacaatcgctttttcttcttgaattagttggttaagcaaggacgatttacccacatttggtcgaccaataatagccgttgccagtccttcgcggagaattttcccttggcttgctgtccgtaaaagttgctcgacggaagcgcgaactaactcggttttctccagtaacattcgctgagtcatttcctccacatcgtcatattctggatagtcgatatttacttcgacttgtgctagtgcatccaaaatttcttgacgtaaattgcgaattaaccgcgaaagatttccgtccatttgccgaattgccacgcccatcgcccggtctgtcttcgcgcgaattaagtccatcacagcctctgcttgcgacaaatcaattcttccatttaaaaatgctcgctttgtgaattcacctggttcagctaaattagccccatttcgaagtaacagttgtaacacgcggttcacggaaacaattccgccgtgcgcgttgatttctaccacatcttcccgtgtaaaagtacgcggcgcacgcataactgtgaccattacttcctcaattacttcgccgtcttcttttatatgaccgtagtgaatggtgtgactttccgcttcactcaagctatttttggcataaaaaatacgatccgctatctgaatcgcctctggaccgcttaatctaataatagcaatggccccttctcccggcggtgttgagattgcagcaatagtatcaaattccattctttactcatcctttctcattagaatttcagcccaaataagccttatcctattttgaataaattttggcacatgattttgtgcattttcaacaacttacgctccgctttgaccaaagcaattaaattgttagtattttgaaggttatccatagacttattaacatatccacagaaaaaccattaataaaaattcatccataccattttaacttatccacatgtgaataacaatagttttatccttactagttaagaaaacttaaattttctcgttaaagctttaacttatccttccacttccttggctttaactcaattctttttatctatactaaagttaaaaggaggacaaaaaatgaaaattcataaactaacttgggtgctactaataggactgctactactctcagcctgttctacggagcaaccaaacttatacttatcagcaaatgccgccgcggtttattcagtcgaaaatggtgaagcgttatatgaacaaaatgccgataaagtaatgccaattgcaagtttaagcaaactaatgacagcttttttagttttagaggctgtggataacaatgaattatcgtgggatgaaaagcttgatcttgttcggttggatgatccttccgcggtttccctttacgcgattacacaaaaaagaacgtggtccgtcagagatttatacagcgcgatgctcactatgtctgcaaatgatgccgcggaaacactgggagatcgtttagacggagctgattttcccaaagaaatgaataaccaggctaaaaaattaggtatgtcgagtaagactacatttgtcagtgctagcggacttgatgtcgacgggaaatccgcggtttccaccacaaaggatttatttttgctatcatctaaattaatttccactcatcctgaagtgttagaaacaacttccaaacccactgtcaccactgacaaaggagccaaactcgaatccacgaacgacttactcggttcgattcaagggttagatggactgaaaactggatttacagatgaagccggctattgctttattggaacagctgaacgtggaggaaaacgtgtgatttcgattgttctagatgcaggaactgcggaaaaacggtttaaagatacggagaagctgatggaggttgggtttaaagaagattagtggcatgaaaaagaacttctcgttgattgagaagttcttttttaaatagctcagcatcaactctttaaagcagaaagatacttttccatataaacatctttatttttagaattatattgcataataaaacgtggatgttctaaaggtataattgtatcaaaaaaatgatgctctttatttatttttgatacaaaatcaaaattatctccgctaccaatgcagtagcagaccgaagtatctatcccaaaatctatttggctgcggattgactctagtataaatggcttcagcgtagcttgaagtttcttattctcataatagttacaattaacctcattgccttttgcattcgtgcgcacaatgccaagtggacaaacaaaattcatgtaaaagtcagtataaaatggcttacaacccccgtattctgtcataacatcatataaaaaatctgaggaagactggtttataaaaaatttatcaataaaaataccggtttcgttttgaatgtgtttcgcgtcttcaaaagggactcctgtaacagcagatcctctccgggcgggagaacttccaagtattatccggcgcggtttagtatcattatagtatttctgataaaatgccatcgttattttttgcactagttcgctttgatcaccagaatatgggttaactgtgcgatacccctccggcaaatcaaacgaacaattcgcaagcgcctcattaaactgcaatattcgtttagcaatagttgtattttcagtcatgtaaattagccctctctttatttttacttaacaatctgccaaacatcctcaaataaatccacataacccgcttgctcccacctactcgcaaaatagggattatgaaaataagtgaacgccgtaataatcgcgtttccttggttcgttcgaccgctaacttcctcggctttttgcgctaaatgtgctacgtggtttttcactaattcttcattttgttcaatataatccgtataaagtaaaaacatttttcggtcggttttgtatcgttttttcttagtatcggccaagagccaaagccagtcgtgaagcgcatcatctggtgtttgccctgcgtcctgtgtccaagcgaaaatctcccgcgaagtttcctctaaccaccgtagcgccaacttttgaaataaatcctctttattccgataatgcttataaagcgccgcatgtgtgacgttcaaattactcgcaatatcatacagcgtcgtcttctccatacctttttcgtagatgattttttctgccatatttaaaatgatttcttgtgatagtctcgccattttaatccctctattcaactcattctttgctttttattatacaggaaaacaaaaaagttacaaatccttgacaaagtaactaaaaggagtatacttccaactataaagttactaaaacttaaaaaagtaactaacttgtacttaaaggagcgaatagattatgacaaataaacgtgttgcatttattttagggggttctggcggtattggtaaggccgtcgtccaaaaattggtcgaacaaaattttgcggttgccgttcattacgcgggtaataaggctaaagccgagacgcttgttgaaaacattgtgaagtctggtggagaagcgattagtgttggcggcgatgttgctgacgaggcgcagatgattcgtgcatttgatttcattgaaagccagtttggtggaattgatgttgtcattaacacggcaggtattatgaaattaagcccgattgctactttggatatggatgattttgacctgattcaacgtaccaacgtccgtggaacttttgttgtttccaagcaagctgcccttcgagttcgaaatggtggcgcgattatcaatttctccacttcggtaacacgtaccagttttccgacttacggggcctatgttgctagtaaggccggggttgagtcgctcacattaattctggcgcgcgagcttcgtgggaaagatataaccgttaatgcagtagcacccggcccgaccgccactccgctatttttgactggaaaagacgataaaacaatcgacaacttagcaaaagccacacctttagaacgcctaggacaacctgaagatatcgcagaaaccgtagcatttttagccggacctgcacgctgggtgaatggtcaagtcattttcactaatggcggattagcttaattaaaaaaggaggaaaacacagctatctggttttcctccttttattttattgatcttttttaatcgctaaaacaatcaatcccgatactaataaagttaacgccaagaacagaaaagccgattgataagagttagtcgcatttaccaaatcccctataatcattggtgcgaaaaagccacctaaaaccccgcccgagttaatagccgcgtattttgtcgcaatgtggctctgttgaaacaacttgtgcggtaaccccattagcgttgtaaaggccatgatgaggaaaatattacataaacacaagcaaataaccgatagcgctaattgttcaaacaaatacaccccgtatactgcaaaagccccaagcacacaaaacacgaaaataataatcggctcttttcctttgaaaaaacgactaatgaaatagccaccgacaactcccgcaattaaaatacaaagcccggctaaagaactaatataactcacttcgctaatagaaatccctctaacctcgttcaaataagaagcaagccaacttgttaagccgtagttcgctgcatttataaaaagcgccgataacaaaagaatccacagttgtttatcttttaaaagttctgagaaaggtactttaattttttctttttgagtatttaggtctattttcggcgctttaggtacgacgattaaaatcagaaacccaatcaaaatcaccgcaaaaccaatccagtaatacgtattgcgccatcctactgatagcagaagttgcgcgattaataatgggccaataaatgccgcaaaaccagaggaagcgagcattgctgactgcgcaaaacctcgcttgtttaatggaatatgaagtgaaatataattactaacagacgggggataacccgcatgtccgagcgcccccgataagaaacgaataacaactaaaaacagtaaggagtacccaaaaccaaaaataacaagaaacaaacctacaataataatcgatatcgcaaggactggtcgtgcgccaatccggttgtttaagtaacccatcggaatttgaaaaagcgtgtaaccgagaaagaacgcacttaaaattaaccctttttgacttggatcaaatcctaaatcctgagaaacagtcacaagcgaaattccaatagtatatttatccacgtatacactggtgtagcctataaatagaacaagtaatacaattaatgaatgtctttctcctttgacctgattcatttgaattcactccactcttctatagtcccgccaattgcaaaagagcataaccagattctttttctgactatgctcttttcaaagctattatccatttaatttataataatctaaaaccacgtccgcaaccgatttggcagcaactaacagcgcatcttcatcaatatcaaattttggatgatgattaaaataagcaatcgaagtatttttcggtttcgcgccaatatagaagaagacaccaggaattttttgtaaataataagcaaaatcctctgatccggaaagcatgtcgtattcagaaatgcccgttaggtactcgccaacacctttttgcaaacttgcaactacttgttccgttacagctggatcgttgtaaagtggtgggtagtcattcgtatacgttagttccaccgttacgctaaacattgcttccataccagcaacaatacggtggatttccgcatccattttatcacgattttcggtattcatataacgcacatcgccttctaactcaaccgcatccttaataacgttaaaactacctttaccatcaaaagaaccaatcgttattacgccagtatcaaatgggttcaaacggcgactcaccactgtttgaatggctgtcacaaaataagcacccgcgacaatcgcatcattcgccatgtgaggggatgagccatgcccaccaacaccttgaattttaagtttaaaataagtgcgaccagccatcgcgtagccactatgataataaacttgcccgctttcaccaaatgggaatacatgaataccaaaaatttgatccacatcatctaaaatacccgactcgacaacgcttttcgctccgccgggaggtgtttcttcggcatgttgatgaacaatttttatcgttccagggatgttttcttttagttggattaaacaatctgccaaaacgagtaaataagcagtatgtccgtcatgaccacatgcatgcattacgccagggtttttagatttaaatggcaattccgtttgctcttcaatcggaagagcatcaaaatcggcacgtaacgcaatcgttttccccggcttctcgcctttaatcgttacaacaacggcatgaccattacccacttcagttgccacttccacgtcttttcctttgtaaaaatcttggatgaaatttgctgtttctgtttcatgaaacgataattcaggatgttcgtgcaaatgacgtctaatctgagtgatttcatcttttcgttcctgaagcatattcattaactgagtacgcatgataaatccaacctcctattcttttgcggcttttaattcgagcgcttttttcgcagatggtgttgttatagcaacggaaataagtgaaacgacacaaaaaccgacgttcgttaaaagccccaccattgcggctaaatcaatatttcctgaaagtgcaatcacaccataaatcgtagcagatatcgccacgccgaatgagccacctagcgaacttgccattttgtaaataccagatgctactccgactttatcttctggagcattagaaatggctgtatctgttgaaggagtcgcatacatgccaagtccaatcccgaataaagcaaaaccgataaatacaagcactgtataaagggttcccggaataaacgtcagcgccattagtgcaataccaacagccgtaataccagagcctaaaatcattggtttacgcgcaccaacacgttgaagaattttttcaccgatgcgaatcattccgagcacacagacaagatatccgatagaaagtaaaccggattggaacgccgtaaaaccgcgaccaatttgcacataagtgtttgcgacaaccagtgttccagctgctgcgtttagcaagaagttcgaaagtgttgcgcctgtataagctttatttttaaataacgagaaatcaataaatccgtttgcttgtcgcagttccactcggaagaataatcccgcagaaactaggaaaacaacgagcattgtaatagtaattgggcttgtccagccaaatgttgcgccacgagtaataataaggttcaaacaaaccattgcgataacaaaaagaacaagaccaaatgaatcaaattttgcttttgtattttgaacgactttactttctggagtacctttaataagtagcattccaagcagtgcgaatacgatggaaataatgaaaatccagcgccagcccatatatgttgcgatagcgccacctgcgaacgaacaaatacctgatccgccccatgagccaattgaccagtaactaagtgctctttgtctatctgccccgtcaaaataagttttcattaaggcaagggttgctggcataatacaagcagctgaaagcccttgaataatacggccgataataagtaacgtcgacccttgagtgacaacaagcagcagtgaaccgatgatactaagaataagtccgatataagttaatttcacgcgaccaaatttgtcagccatcccacctgctacaacgataaaaatacctgaaaatagcgcggttaaactgatggcaatactaagtaaatcagaggaaattccaagatcagattgcacggccggaacaatattcaccatagattgagcaaaaagccaaaacgtgataaccccgaaaacaattccaacgattagtttatttgtacctttatacgctgttgaagtcattagttattctctccttttaagtaatctacaacacaagctcccatggcttttgatgcaattaataatgcatcctcattgatgtcgaattttggatgatgatgcgggtaaaaatggccatctgccggcattgctcccacatagaaaaatgagctcgggcgttcttttgcataataagcaaagtcttctgatggtggttgcggttcacagcgcacaacatccgtgatttctgggattttcgctcctttaatagatttaacaacaaagtcagtcaaagcttcgtcattatttaaaaccggataatcatttttgtaatcaagttcacaagtaacgccaaacattgcttctatgccgctaacgatacgggtaatttctttttgaataatgttgcgtgcctcttcagacatcgaacgcacatcaccttcaagctcaaccgcatcctttatgacattaaaactaccttttccgtcaaaagaaccaattgtaatcgagccgacatcaaatggatttaaacgacgactaatcaccgtttgaacagctactacaaattcacttgctgcaacaatagcatcattcgctaaatgcggagatgagccatgtccaccttgaccttgtaccttaagtttaaaataagagcgaccagtttgaatcgcaccctcacggtagaaaacctcgcccgttttcatcgtagacatcacatgaattccaagtacattatctacaccatccagcgccccatcttgaatcatttgaattgcgccaccaggaggagtttcttccgcatgttgatgtaaaataacaagtttccctgttaattcttgtttcatttcaataagtgtttcgcccaaaataagcatgtaagctgtatgtccatcgtgaccacaagcgtgcattacaccagggtttttagatgcaaaagctaagccagtttcttcttggataggaagtgcatcaaaatcagcgcgaattgcaagtgtcttacctggtttgcctgtatcaatcgttactacaacgccattcccgccaacatgcgtccgcacatcgcagtccatttctttataaaaatccgcaatatacttcgccgtattctcctcttgaaaagaaagttcagggtgttcatgtaagtaacgacgaatttctatcattcgatctcgtttttcgtctagtttttgaaataacttctctttcattgtccaaacctccatttttaatacttccgctggccagaacttccgtatttttaactacacctttattataaaaaaaaacaaactaaaagaagtttgcttttttgcttagttttagcttgaaattttcttcttttctaaaccgtagcaaccaatgtcaaaaatccggtgttaggggcataaaaaaagttcaactgcaggagttgaacctttttaaatcgtacttctaaactcataaaaatgaatcgcattaatgtctaaataagcataaaacgaccaatcttccgtaatcgtctcatcgctcaccgtaagagtcggctgagaggcatcaacaatataatccaaaatctctttatccagtccatacttactattaagctgccaatatttcgagtaaagcgccccattatcgcggtcgaattgccatttacacacttggtattccccagcttgaagccctgttattcggatatgcagttctttctgctcttccttagtaaatctctcttccacagaatatctcgggttaatattcgcacagttcatcagaataagttggtatccgtctgtatgcttcgtcataataaaatccgcaccctcagcaacaacaacacctttaagccttctcaaaaacttcaccgcataaaacgccggtctttttccgtcaaaaaagtggaacatttcaatcccatctaagctaatatttaattggctgtcatcgccttcatgcagttctgtattaatccagaaccctagcgcatccacttctggtgctaaatctagcattgtttttaaaaccaacgcacctcggaaaaacgtaccattcgtataccgtgtatttcccgttagtgtattccagttcactagcataaggggtttattaatatgatggtgtttcaaaaaatccttcaacttccgtgttttagacaaacaataatcttctgaaatcataaacgacttcatatcttccttcgaaaaatccaccgcttcattttgattcgcattataggccacaaagtcaattttatcagccacatctaaaaaccacatatgccgttctgggacttcatttttagaaagtgaaaacgggacaaaatttccgacttggatagctggaaaacgcgattttataatatgatatattttcaaataaagtttttttagttcttccttatcagcatatgtatttttcggctcaaaaaacataaaatgccacttagaaacaaattctcgcccaaaaacttgcatacaatgctttaaaaaatgatctaatcgttcaaaaacagccgctacatcgcctacaatatcttgatactctatgcgaatgaacaactctaaattttgttgttttaaaaacgtgagcgccaaatccgcgttagcgtatggcgaagatgtcggtactagctcgtccgtttccgtttcaggcaagaacgtcgaacccctaaacaagtgacgaataccaatataattaatcccaatttcatcgcgtgtcgttataatctgcttttgcacgttggctttaagcacttctttaagctcaccaattgttaaaatattcatattctcactaagacaacgggcagtcttttccgtaatatcaattttctttttctcaaatggcgctttatttaattccttgcccggctccacatcatgataaagtcgcgacaaattcactaaaatctccggagatggcacaatttgctctatactagcgcccagctcagatgccttattgtctattaacaaattcgtttccgcatgatgttccgctctgtactcacttggcgttagctcaaaatgaaacttaaatacttctgaaaaatgcttttgactcgaaaaaccgttttttaacgcgatttccgtaatactttcagccgaatgtagcaaatcttgaatcgcatgcttcaatcgaacttccgtcaaatactgcaaaaaaccaagcccagtcgtctttttaaaataacgagataaatacgcctcgcttaaaaactctttttgcgcaaacacacgaagcgacaaggcttcatcaaaccgctcctccacttctcgaatgatgcgcgaaattcgtttatcattgacttctttcctagcagaagatggaaccccttttttcaaaaaacgcgtaagtaataataaaatttggaataacgccgattgcgcttctaatttattcgcccgtttcttcgtcgccgaagcaatcaaaagctcactcaccgacttccttaatgacccaacaacccgctctctcccagggtcactctccttcgagaaaaatttaaaagaatgctgaaaataatcctcataataatgcgcaaaaaatgtatctgaaatcgttaaattaatgaataagtttgcttcatttccttcaattgtataaaaagtgttgcgatcaaggactaaaatatcgccttcctgcaagtaaaatttttgctcagaatccttgattgttatttgcccagaaatagcaaataccaatttagttccaagtgagatttccgacgtcagctgctttatatgttgaataccaatcgtataatcttttaaatgagacactcgattcactccttcgtttaacttaatcggacacttttatattatcatagtcgtgaaaattaatcgctaccattttttatgattgctttagtcatcaaaccgacacaatcaagtcacatatctccggaatttttgtacttttgcgagacaaaatagtaaataaaacggcgtataataaatgattatagagaacgaataaggagtgcgccaaattgaaaactactaaaatagtaattgcctcattagttagtttaaccatggtttcaaacccgcttttaacattcgcagcaacgaatgatgttattgataatacgacagaaatcactactgataaagaaacaagctcaactcaaccaactataaaaaacacactcaaagccggtcaaacacaaagttttaacgactggtttcctgatgacaattttgcttcagaggtagcagcagcatttgaaatgcaagcaactgacactatcagcgaagaacaactagctactctaacaagtctagattgccataattcatccataaccgatatgactggtattgaaaaattaactggtttaacaaaattaatttgcacaagtaacaacattaccacccttgatcttagccaaaacactaatttaacttatctggcatgtgattcaaataaacttacaaaccttgacgtaaccccgcttacaaaattaacctacttaaattgcgacacgaacaaactcacaaagttagatgtaagtcaaaatccactgttaacttatttaaactgcgcgcgcaacaccttaaccgaaatagatgtcagccacaatacacaattaaccgagctagactgccatttaaataaaaaaatcaccaaattagatgtgacaccacaaactcaattaacaaccttagactgtagctttaataaaataactgaattagatgtaagtcaaaataaactactgaaccgtctaaactgcgacactaataatataactaaactggacctcaaccaaaatattcagctaactttcctagattgctccagtaacaaattaaccgaaatagatgtaaccccgcttacacagttaacatattttgattgtagcgtaaatcctttaactgaattagatgtatctacgctttcaaaattaactacactacattgtatacaaacagatttattagaaatagacctaacacacaacacacaattaatatattttcaagctgaaggatgtagaaaaataaaagagcttgatgtcacgcataatacacaattatatttattagactgccaagccgctggtataacagaattggatctttcacaaaaccctaaattagtctatttgtatttaaataatactgaactaacggaattagacgtttcccataacacaaagctgaaaagtttgtcttgcgtaaatgcgcacatccaagacttctcttctgtaggtaaaattcctgcccttaacaataattttgaggctgaagggcaaacaatcacgatgcctaaagaaactttaacaaacaacagcttgaccattgcagttagccctgatttattagatcagtttggaaatccgatgaatattgaaccgggagacggcggtgtgtacgaccaagcaacaaatacaataacttgggaaaatctcagcacagacaatccagccgtaacctatactttcacttccgaaaacggagctatagtaggaaccgtaacaactccatttgaagcacctcaacccatcaaaggagaagacgtcacagtacattaccttgatgacaaaggagaaaaattggcggatgatgaagttctaagcggtaatttggacgatccttatacttctagcgcaaaagacatcccagattatacattaacgactactccagataacgcaaccggaacattcaccactactagccagtccgtaacgtacgtttacactaaaaacatcgtagccgcagagcctgtaaccgttaattacgtggacgatactggaaaaacgctctctccatccgaaatattaaacggaaatgttggcgacacttataacgccactgccaaacaaatcgacggctacacattatccgccgaaccaaccaatgcaactggacaattcacaagcagcgcgcaaaccgtcaactatatttacacaaaaaatccagcccctgaaaaaggagttgtagaaattcactatgttgacgaagataataaacaacttaactccaccacagaaatttctggaacaataggagataactacacgactgagccaaaaactatcgaaggctatacgttaacaactacaccgggtaatgcaaccggcactttcaccacaggcagccaaaccgtgacatatgtgtatactaaaaacatcgaagcagcagagccgataacagtgaattacgtggatgctaatggcaaaacactcgctccatccgaaacattaaacggaaacgttggcgacacatataaagcaactgccaaacaaatcgacggctacacattatccgccgaaccaaccaatgcgactggacaattcacaagtagcgcacaaactgtcaactacatttatacgaaaaacacaaacacagatcaacctttaccaactaaaaaacctacgaacaccacaccaaccaagccatctaatttaaagacaaccgaagtgaaaaaagcttcagataccctaccaaaaacaggcgattccgcaccatggaaatcagctctacttggggtattcctatcatccacagctctagttatctggaaaaagaaaaaatagtaaaaaagccggacaggattaatttcccgaccggctttttgatttcaatcttcttccacttggatagaaacacccacatccagtaattcctcaactgcatcaatcacagaaaactccccataattgtatactgcatcatcgacaactaaaatcggcaaagcttccattccattcttatcaatcagcatttgaatccgctctggcaagtccactttcccgacttctcctagctgaatatcaaacacaatacctgtatgatcaaaatgaatttttcgctcagcttcactttgattcataaacattttccatatctcaaggttgatctcagactcattttccgcagaataaaagtaactaatttgcttcataataaaaactacttactttctaaatcatggacaaacagcccacttaataatttcggttcaaaccaagtcgattttggcggcatgatttctgccgcatctgccacaccaagtaaatcgtccattgtcggcgggtacatcgcaaatgccaccgaatgactgccattatccaccaaacgagtcagttcttctaaaccacgtattccgccgacaaaatcaatgcgattgtcgcgacgaatatcttcaattccaaaaatcggcgttaaaatttgcgattgtaatatcgaaacatctagctgaccgataacatcatttggaatcacttcgcttttcgccgtaagtttgtaccaatttccgtctaaatacattcctacttgttttggcttctctggcttaaatgcttctttcccaaccttttccacatcaaaactagtctctactttgctaagaaaatccacttcaattggcacattcacaactcgattataatcaagaatttctaattgctcttctgggaaaacaaccgataagaagaaattaaattccgcttctggcccagcatccgggaattcctcgcgccgtttcaaaccaacttttacagcagattccgttctatggtgaccgtctgctatatatagcgctgggacttccgagaacgccgctgacaggtcttctaaaatatgtgcatccgtaattgcccaaaccttatgcgcgaccccatggaagctctcaaagtcatattcaggctcattttcattcacccaagactcaacaagggcattaattgcttcttttccacgataagtaaggaaaatcggacttgtattcgcatcacagacatctacatgacgaatccggtctaactctttctcctcacgagttaactcatgttttttaatttttccatttgtataatcatcaatcgacgtacaaacaaccagccctgtttgcgggcgaccatccatcgtcagttgataaatataaaatgccgggtttgcttctctaccaagccaaccatccagctcaaattgctccaaattatccgctgctttttgataaacagctgggtcgtaaggggaaaccgctggatctaaatcaatttccgccttatcaatatgtaaaaaagaatacttatttgcatcaccaagttcgcgcgcctcttccgaattaagtacatcatatggcaacgaagctaccttttccgctaaatttttaatcggacgaattgctttaaatggacgtatatttaccattgttatcctcctttttagtaaaagagcatgaacccgtctggcaacaaccataaagtttcatgctctcattatttcccgggtaataattttaaactgtcacacctaatggttcaataactcgaacacgcaaaaccccttgcacagctaacaaatcttgttttagttgctccaaattagcttgcgtttctttatcaatatcaattaatgtgtaggcatattcatttttactgcgatttatcatatctaaaatgtttaacgagtatttcccaagctccgtcgtaatttgtccgaccatattaggaatgtttttgtgacaaatcccaattcgtggatgcccattatacggcatttccacgttcggaaaattaaccgagtttttaatactacctgtttcaagatatgattgtagttctttcgcagccattttagcacagttggtttcagcttcttccgtcgatgcgcctaaatgaggaaatacatgcacttttttatggtttaataattcttttgtcgcgaaatctgtaatatacaaacgtaaaagtccgtcatccaaagcttccttcacagaagcagaatccactaactcaccacgagaaaagtttagtaagaccgcattatccttcactaattgcagtgtatctgcgttaaacataccgcgcgttttatccgttaacggtacatgaaccgttaaataatcgcacgttgctaaaacttcttctatcgtcatcgcgcgttccacttctttagaaattctccaagccgtgtctacggaaacgaatggatcataaccgaccacatccatcccaagcgatagagcatcatttgccactaaagctccaattgcacctagaccgataattccaagttttttgcccgcaagttcagttcccgcaaaagctttcttaccagcttcgactttctgttccacatcatcttccgccggtaattctttcacccactctgttccttccaaaattggacgcgccgaaacgaataaactcgcaaggactagttctttcacggcattggcattcgcgccaggtgtattaaatacaacaatacctttttcagaacaattttctactgggatattattaactcctgcaccagctctagcaactgctttcactgtttctggaaagtcaaaatcgtgtaagttgtaactccgtagtaaaatcccgtctgctggctggtttgcatcaatcacatatttttcaagatcaaatgtctttaagccttcttttgcgatagcattaaacgtttggatattaaacacgtacttctcccccttttcttgcatttgcaaatttttccataaaggcgattagtgcttcaaccccttcaattggaaatgcattgtaaagacttgctcgcatcccgcccactgagcgatgtcctttcaagttttcaaaaccgtttgcttcagcttctttgacaaaagctttatcaaactccgcagaattcgtcacaaaaggaacattcgtgagcgatcttgcagaaggttcgaccggtgaagaaaagaaatccgattgatcaatataatcatataataatgccgcttttttgcgatttaacgcttcaatcccagcaacgccaccttgctccttaatccattcaaatactaatttcgctacataaatggcaaacgttggtggtgtgttatacatggaatcattctcggcttgtactttgaaatctaacatagaaggaagtccctctacttgccctatcaaatcttcgcgcacgatgacaagcgttaatccagcaggcccaatgttcttttgcgctcctgcataaattaagccgaatttcttcacatcataaacgctcgataaaatattagaggacatatctgcaacgaccgggacagctgagtctggcacatcaaacattgctgttccttcgattgtattatttgtagttacatgtaagtaagccacgtcactagaaactgtaggaatttcaggaatatagctgaaattgcggtcttccgatgaggcaatcacttccacctcaacaccctgaattttcttggcttcggaaattgctttcttcgcccaagatccagtatttacatacgccgcctttttaccatttgcaagattcatcggcaccatatcgaattgcaaactcgcgccaccttgcaaaaatagtactttgtaattatctggaatctccatcaattctcgaattaagctctccgcatcgtctaagatgttttgaaataattctgaacggtgactcagctccattactgacattcctgaaccattataagagagtagctccctttgaaccttttcaagtaccggtactggtaaaaccgccggacctgccgaaaaattataaacacgttccactcaacatctctcctgtcatcaaatttccccaattacttataaaaatttttaccaataatagaaaacttattggccagatatgagccttcctcgttacacttatgcttttcgaagttctgttcttaagaaataaaaaaaacgaacctgtgatattccacacaatattcggatttttcagcgcttaaaagtaaacactgccttttgtacttttgtatattatagcagaaacagagctgtttttcagaaaatttatactaaatctacaaataaatgtgatgtttaaactttctgacattaaaaaaacacgagaaaccgctatttaaagcaattctcgcacttcttctttttgaaaaacacttcacaagagatgttagctatttttcacttttcgtcctaaagtaaaccaatacacggcaaaaaatacaacaagtgcaataattgctgtgcgatacataatagcataattgtagtaagtcgcaacaatactcaaaccaaaactaccaacagccatcccaatgtccattcccgaaagaaaagtcccgttcgcggtacctttattgtgcggtgcagcccggtcaacagctagtgcttgaagcgccggttgcgacatcccgtaacctagcccaaagaatagcgatgcgataaacaaactgattgccccagttgcaaaagaaagaattaatatcccaattatcatcgaaagcgctcctggaataataacaaaacggtgtccctttgtatcataaagtcgcccagcaaacaaacggctcacaagaaccataatcgcttgcccgataaaatatatccacgtcgtcgaaatccccagttctgttccatataccatcataaatgtctggatcccaccaagcggaatagccattaataaacacaagccagccggaagcaaggccgttttctcaaacaatttcattttttgatgtacaattttttctgattttggaattttcacctgtgtcatcaaaattaaaataaataccatcaaaacaagcgaaaatgtcactaaaacatcgaaagaaaaataattcataattaaaatagcgataatcggcgcaagtgacattccaagtgcagtcgtaagcccataaaaaccaataccttctcccgttctgcttggcggcacaagtttagaaacgcctgttgcaatggaagttgttccgataccccagccagccccgtgaaaaagccgcaatataagaagggcagccaccgcagtcgaccaataaaagtttactgtagttaaaattaaaatcaaaaagcccacaataataagtactttcgggccaaatttatcgttccaacttcccgcaatcgctcgcatcagtagtgctacaatcgaaaacaaccctaccgccaaactcgcttgcatttgtgttccgcctagttcaataatccgggccggcaacgtcggcataaacaccataaatccaatatataaaagtacacttcctaacaataaaaatacgtagtccttcgtccaaagccttgtcttattttccaaaatttacccctctttactctatattagtagaaatgttctttaaaatagccgtgaattgttccaaatccgcgcgctcaactccggcaaacattttttcgcaactcacttccacgatatctcgcagttcgttcgtctcttttcgccctttttcagttaaagataacagcgaaatccgtctatcttctgtactgatttcccgcacaataagctcttttctaagcaaaacatcgacaatgcgattcacagtcggtgtatccttcttcgtccaaagcgcaatctctttttgtgaaattggctcgttcgcctcaattccctctaaaacagaccattgctcaggcgtcacgtcataactcgcaattgaacgcagcaaaaacaaatgcattttcttcgctgtcgtattcacatcaaatgagatttcatcataatatccgcgcattactatccccttttccattgtcgtaacaataattgtcataacaaccattatacatattaatttcctctttgacaagaaaagcagccgaataaacgactgctcctacaataattccacatcaataatatctctaaattcaataacatattcatacccaactatgtccttaaaaataacttcttctgttaacatatctatttcgagtggcaccaaatcttgtttttcaagttctccaagcccaaggaatgcgtaaggatattcaaaggatgctagacgtaaagaagaaacatctgcttcttgaaaatagcttaaccgaacgacccattctcgcttcatggcatcttttaatgtgataaaaaagctctcgcgttctaaataatccacttctggccgactcgttaaaaaagctgcattcttcgctgtccgcacttgctctttctggattgccgtaaccataattatcacctcttaatcacattatacgaacaaacgttcttaaaatcaagtattttgctaaaaaagtttttccacaagagccagaaccggtttagcgcttacataatctttttccgacaaaaacacttgcaaattaataaatagtcgctatacttatgtaagtaaataacattaacaaaggagttttattattatgactaatacatttttagattctattaaagttcgtcgttccatttatgcactagataaaaacgtttccgtagaggattccaaaattgaagaaattattaaagacgctgttaaatatagcccatcttctttcaactcccaaagttctcgcgctgtcattcttttaggcgaaaatcatgataaactttggagtatcgtagaagatacattacgcgctatcgtacctgctgaaaactttgcagctactgaagaaaaagttggttctttccgcgctggatacggaacagttcttttctttgaagatactgctgttatcgaaggcttacaagaaaacttcgctctatatgcagacaacttccctgtatggtccgaacaatcttcaggtattgcacaacattctgtatgggttgctcttgcaaacgctggtatcggtgcatctcttcaacattacaacccactaattgacgatgctgttaaagctgaatggaatattcctgctagctggaacctacgtgcgcaaatgccgtttggtaacatcgttcaagaagctggtgaaaaagaattcatcgatgacgctgatcgtttccgcgttttcaaataaaatgtttcacgtgaaacaaaaaattccgcgaccattaaatggtatcgcggaatttttattttgccaaacttttaaatctgcttctaagttcatcacaactgacaataccagcaattgcgcctttaatttccccatcaacaagaacaagcgaatttggtattccttttacatcaaatttctgagctaatgcgcgttgtttatctacattaattttcacaacttggacattaccttcttccatctcagcgaattgctcaagtgttggccaaaagcagcggcaaggtgcgcaccactctgcccaaaaattaagtaatattttaggatggctactaataatctcttccaagtcatcttcttttgcaaaaataatcgccatacatatccacctcacattcagaatattccaaagttgtatcgtggtcaagtaaagggttttagaatagcaatatatcttgctctttgttcattttttgacacttttgtttcacgtgaaacattttatttgctatgtaagatctctaaaatgcgtaaatctagcaaaccagtactcttcacagtcatatccgcgtcacggagtccggaaccaacaccaacgcttacaattccagctgcatttattgcttcaattccagcttgagcgtcttcaattccgactacctctgatgtttctaagcctagaccacggcaagcttccacaaaaatttctggatcaggttttgatttagtgattttagccgcgtcgacaatataatcaaattcttgttccatttctaatgcgctcaaaaccgtccgagcgtttttcgaaacagatgcaattgcgcatttgagattttgctttttaagatccactataagttctttaattcctggtaaaacatccgctggcgtaatttcttttagcaagctaacataaaagtcatttttatcagctgcaagagcttcaatctgctcttctgtaaagtcattttcgcgaccgtctttccttaaaataagaagtagggagtcaattctgcttactccttttaaattctcattaaatgcttcatcaaattcgattccaatactctcagctgtttttttccaagctaagtaatgataatgcgctgtatccgtgatgacgccatctaaatcaaaaactactccttttaatgctgttgtcattctactcgtcctttccaaactgccgcaacatttcgcgcggttcttcttaaattatttggtgtttctttaagtatactttctaaagatgctggcttggcaatagatggaaatactgcgctgattccgacttcatatactgcttctagtccctcaccaacacttccacaaattgcaaaaactggtgtttctttcggcactactttcgcaacacccacaggagctttcccttgtgcggtttgcccgtccattttcccttcgccaacaatgaccaaatctgcatcctcacaaatggttttgatttgaagtgcttcaataacaaaatcaattcccgataaaaggttagcttttgcaaacgtcacaagtccagcaccaatcccacccccggcacctgctcgcggcattgtaaccatggcaggatttgctaattgataaaaatggcgcattgcttcatctgctgtagctaaatctgttgtggctagccctttttgcggaccaaacacatacgatgcgccagcttctccacaaagcggattttcgacatccgtgacaatatttactgtgatgttttctagttcagcggggaccttttcggaacgaatggttgctatatcagctaaatttacgccaatcgggttgacgatattattttctgcatctaggaattcataaccaagcgcactagccatgccaattccgccatcgtttgaagcgcttccaccaatcccaataataatctcggtcgcaccttttttcatggcgtgcaaaattagctcgcccactcctttagtactcacttgaagtggatcgcgtctagtcgtcggaactaagtgcaaaccacaaacctcggccatttctattaaagcttttttgttcccttccgtgaaagcaacttgcgctgaaactggttcgctaaaagggccggacacatcgattttcatttttttcgcgtctaaagctttacttaaaatctctagcgtgccttccccgccatcactgacagggagtaaatgataatcagcatccggataaatttcttgaaagccctctttaatatactctgccacctcatgcgccgtcaaactttctttgaatgaatccggtgcaatgacaattttcataaagacacatccttctgatccaacttaatagttattgtatctgttagttggtgtttttctccgtagataactaattctagcacgctttttgtgctttttgaaagttgtaaagtatttggcgcgatttctaccaagattttttctcctttccaagagaattcaaataccacagattgccactcgcccggtaagtttggtgctatttcaagtaattccccactagtatcaataccaacaaatccaaaaaccaccgccaaccatattgcgccgagagacgctgcatggagcccgtcatccgatgaatgaggctcacttccaagatcaattaaacacgcttcttggaaaaattgataagcttgtgcgcgattcccagttcgattttctacaattgcatggattgctttacttaaagaggaatcatgaattgttcgtttttcatagtaatccaagttctgcttcacagcatccggtgcaaacatcttcggaaacaggtaaaacaacatgactaaatctgcttgctttaagatttgtagttcgttcacttcttgacgagaataatctagtagaatcccttgtgttccttgtgccgccttatatttatctaaatttatccaatctttttctaagaaagtatcatcttgtggaattaagccagactcatttgcgacaggtaaatagattttttcaagaaaagcttctgcacgggctacaaaatctgcattatctttattccatgctagtgctttttctacattatagtgtgccatataattcgtataagtattattatcgatatgctctgtgtattcgtctggaccaatcacatcaaggatttccagtcgtccattacgattagttgcacggcttagccaaaattccgctgtttcaaggagcagctctgaaccacactctttcataaactgcgcatccttagtcgccgcttcatattcacaaaccgcataagcaatatccgcaactaaatgatgctccgaaatcgccgaagctactttttgacgtgttccagttcgaatgttaattgctgcaaattcaggcgtttcttcgtcgccagagaacgcactttcccatggaaaaagcgccccgttatagccgtttttcgtcgccttttctttcgcttctttcaaatgaaggtagcgatattttaatagttgtttggcaatttccggtttgttataaaggaaaaatggcataatgaaaatttctgtatcccaaaaaacatgtcctttgtatccttctccggtaagtcccttcgccccaacgctacagcggaaatcatcttttggcgtcataatttctaagtgatagcacgcaaaatccagcgcaaattggtcaaaatcattcgtgctctcaacacggacacccgcatgctcccaaaaatctgcccataaagtttccgaagctcttttcagttctgcataagtcgtatttggaagttccgcatccacttgatccagggacgttttaaccatgcttattttctccaaagtgaatagttgattttcagcgatttcttgctctacttcggtcattagttgtctgtttttcgcagtgaaaatcccttttttattcacttttgttgctattgtaatatgctgtttgctctcgatggtttcatattcgccgaccatcaacttctcatcaaaaatccgcaaactcgactctgccagttgctgtgttccaaaattagtttgttgcgcatcaataccagtttttactttaactttcgctccgccgctcaaaggcattatctccactttagcagcaataacgtgctttgttgctttggaaacaaatcggtaaaaattcagttggtattttttgcccgcgctactttcccaagtaatttttcgaaccaattctcctgtgtgcatatctaaataacgttcatacgcatggattttccctgcttgcatcgaaaaagtttccccatcaagcaacacttggaaacgtgtcacatctggcaaattcacaagctccgaactcatcgaaccgctcggacgattgtaaatccccgccacgtacatacctctcacttgctcgggatactcttcttcaagagcaccacgcacgcccaaatagccatttcccacagtcatctggctaccgtatttatttagataatttaatgaaaattccttctcgattattttcctcataaagaaacactctcacctttttctgccgattcgtataaactctcaacaattttttgtatgatataaccttgtttagctccagcaagctccacttttccagcaccaagaacactatcaacaaaagctttcatgctgttttcgtgtttattttcgtccagttgacctaacttctctaacagctgaaattcacctgcattatctgtataaatttcagccgggtataaacttcctcctgctagatcaccaaaaaagtcaacatttagggcactttcaggcttaatatgtagcgcaaaagaagtatctagttcaattaatccgccattttccagttcaataaagccgaataaagaatcctccactgtatatttttccggatcccacgaaccaaatgtcccagcacttttcttggtaccgattttttggaaactttttgctgttactttcttcacttttggaaaaccaagaacaaacatcgctgcatcaagcatgtgaattcccatatcaatcagtggacccccgccttgcatttctttattcgtaaaagttccccaacctggcacgccagaacgacgaagcgcagttgctttcacacaataaatttcacctagaagcgccgaatttctctttaaaaactgtgcttcactggaaaaacgatgatggaaatcgtacgacaaaatcgcgcctttttcttccgcaagttcccacattgctttcgcttccgccgcactcattgcgggtggcttttcacacataactgctgctccattcgctagtgacaacatcacattatcaaaatggaaccgattaggcgtgcaaatactaacaatatcgattttctctgccgcaaacatctcttctgccgtagcataatgcttctcaaaaccattgttcgcgcggaactcttcgccacgctccaaacttgggtcgcaaacagctacaagctccagttcatttcttgtcttataatatgcagcgtggaccttctcagcgacttgtccagcaccgataattgcaactcttttcttcattatccgaaactccttttagaaaaatccgtcctctttaattgggacggattttctattttaaattaaacagctttttaaatgtgccaacgcatctttataagcttgttcaggattttcactgcgaacacgacattcaaaagttaaaaatccgttgtaaccattctttttcagttgatcaaaacttgttttaaaatcaaggctaccgcttcctggttggtagcgatgattgtcagcaacatgaatgtgaccaatcgaatccttatacgtctcaagcgccgctggaatgctatcttcttcaatattcatatgatagaaatcagcgataatttctacatttttaagattattttcatcaatgtatttctgcgcatcacttagcaaattaatcatatgatcttggtatctgttaagcggctcaagataaactttcgtgccagtctcaccagcaattttgtccaagtaaactaacgactcgctcacagctttgaaatctccggcttggctacgcggtgaagccattggtggaaggcggtacgtgaacattccccatgccgcaggaacgacaatcccttgcccaccgacttctgctaaagcttctaaaatcgccttaatttcttccaaaccattcagtctgcgctcttcaatgaagtcaccaatccagccatcataaccaccacatgcagtactaacaggtagccccgttttttcgattgctttcttcacttcgtccaaattttcaacaagtaatttaccatcaatttcaaaaccttcaaagcccatttcttttacataagcaaatttttcttctatattttctgggaaaaatgcttggttttgtgtgcctaatttcattattatcgctccttaaagggtaatccccattttaatacttaaatcaggttgttggtcgacatatttcatataactttcagctgaatcagcgaatggaacaactggatcaataatatctgaacaatctaagtagccattcatcaatagttcccaacaggtttcctcgatacgcttacgatcccaacgcggataatccggattgggttcgctagctgcacgtgaaaagacgattttcgcattgttgaaatgagcttcacgtccaaggttaaatccttctgggaaaggtttcgcgaatgctacgtaagaaattgtgcctccgtaagcaattccgcgcaacgcagcttgaagcgccgccgcattcccgctcgtttcaataattgaatccgcaccaagtttaccagtcagacgcttcacttctaagccaacatctgtcgtaatcggatcaaaagtagcatctgctccatgtttttcagcaatttcacgacgatggctaagaggatccaccccgataacaacactcgctccagcttttttcgccagttgaatcgcaatttgaccaatcgcaccaagtccgacaacaacaacgtaatcgcccgcacgaacatgtgcatctcgcacgccactcattgcaaattgagccgggtcatagcaaactgcatttttccaattagcaccttttggcaatttacgtaatttataattatcaacagcttttacaataactgtttccataatcggtccgtaagaacaaacgatgtctccaagcgcatattccgtcactttgctcccgcgttcaactacttcaccaacgaccatgttacctagctgaaactcgccaaacacaatgcctcgcgcactatttgtttcacgtgaaacaaatagattccattctggtgaaaattcttcatcaataaaaggactaattcctctaaaatcaactacttctgtaccatgttttggagaagcaaattgtactttaatttttacttcatcttctaaaacttcacgatcattatattctactaataccgccacacgaggcgctgttgctactaattttttcatgttaaattacttcctttcttatcctttaactccaccatcagttaagtttcctttgataaatcgttctgaaattgcgtacataataacgactggaagcgccgttacaagcgatgccgccatcattctaccccaaatataatctggtgtactaaataatgtattcaagccaatcggtaacgtgaatttctctgagctagataggaaaatcgaagcaaacagataatcattccaagctaccatgaaacaatatacaaacacagaaacaatacctgaaatcgcaagcggaacaataattcgtaaaataatctggaagcgattcagcccgtccatcattgcggcttcttcaatatcagttggaatcgtgtcaaaataactttttagcataaataccgcagttggtaaggtttgtacaaccatcgtaataattaaagctgtttccgtatcatacaatcccaaactcgaaattattttgaacaacggaacgattaacaagattccggagaacatgtaaaccgtgtaaaagcttgcattaatcgtcattcgccctttaaagcgtaatttcgacaatgcataagcgcctaaaatccccaaaacaaccgcaattcccgccgcaaaaaccgaaacaaccaagctatttttaaagtacgttaaaaacggaaaaatatctggattaaaaatatcgatataatgctggaaagtgaattctttcgggaaaaatgttggattcgtggaaatagcttctttactactcttgaatgaagtcattaacataatcgcaaatgggaacaacgtcatacataaaaacacaaccatcgtcgtataaaacgcgattttcttcgttctttttgactttttactacttaccgccattcaaatccacccgctttcttgcaaaaataataacaacaaaaataatgacaaataatatcacagaaatcgctgctgcttttcctaaatcattgaatgcgaatgctgttttatataaataaactccaaggatatttactttattcgtgagtaagtatacatcggtgaacatatagaacatccaaatcgcacgaagcgtaataactgtcgcaagtaccggcataatcgctggcaaagtaacaattttgaatttatcccaaatgttcgctccgtccatatcagccgcctcataaagcgacttatcgaccgtttgcaaaatcgccaaaaacgaaataaatgcatacgggaaataacgccatatcgcaaaaaaggttactaaaaagaaactagaaactggattatcaaaccatagtggcgcttctttgaacatatgaagcacatccactgtcataaaattaattacaccatagccattattaaacatatatttccatgcaaaaataagagaaatagatggtgttacatacgacaaaataatcagcgaccgagccgttcttctaaagcgaaattcacggttaaagaatatcgccacaagtagccccatcccggtgcttccaaccactacaagcgctgtataagccacagtaagacctagtgatttataaaactctggatccttcaaaatatctatatagttttgtaaaccgataaagaccgatttaatattcggatttagtggcatatctaaaaaactaatctggatatttgaaatcatcgggtataacacaagtgctgccagtaaaacaaaacttggcgcaagtaaaatcattgctaacttaaagtcagaccttttatatacttttgttttcataatgcctccttaaatcaaaaagcgacgtgctaaactgttaaaaaaggcggggagactcactccccgctatttgattatttgccttcttcagcttttttctgtgcagcttttaggtccgctgatacatcgccaccgccaactgttacgttattaaccatttgtgcgataatgcctgagctagtaatatctcccatttttgtgagatttttaccgtcaacaagtccgaaaacttggatgtcattgaaagatgctgcaatttcatttggaagatcaccaaacgatttaattacttcgttttctttgtaagctttttgttctactacttctttgtttactggttgcgccccgccaggagacattaatacccaagttgccatattttctggttgagacaagtattcaacaaatttcttcgttgctttcttttgctcgtcatccaaaccagctgagatagttaaaccagaaactgttccataaactgctttttctttttcttctggaattgcgaaaccgatattttttggatcgccttcttcataaacggatggaaggatatacgtagagtacattgccattggaactgttccattcataaatgcatctttaatttccgttacatcatttgaaccaggcatagtgtatgctgacaaatctttgtaatattgaagcgcttctttcatttctggtgtatcaatcgttacattaccttttgcatctaaaacatttgctttgttagaaagtgcgaattgagagaaagcttgctcactcatcgtgctttctgctgttggaattgcaataccatattttttatctgctttattcgtgaattttttcgctactttttcaatatctgcccagtttttaggttcttcaaaaccagcatcggctaaagcttttttgttgtaccaaataccttgaacccaaccgcttaatggtgctgcgatatagcttttaccatcttcagaacgtactaagtttgttgcgccttcgtagtatttgtcttctccaacagaatcaataacttctttcactgcatcttggtcaatcaactcatctttatccattactttggcaaaatcttgacttacttccataacagctggaagtttaccagagcgagcaagtgtgacaacttttgtattgaaagcatcttcctctactggaatttgtttgattttgattgttggattttctttttcaaaatcagcaattaatttattaataacatctaaacgctctttttcaacggatgaatgcataaattcaatcgttacttccttactaccagactcttttcctccacatgcagctagaaccgcacttagaaccaacacaacaacaagtaatacaagactctttttcttcatttttgttcctccctgtaatttttggtttttagccagcagaattcatagccactaagctttatggaatcgctcccagttactgtggagcccttataaagatttgtataaacaccgctgtctagtgaataactcacttctttttctgataaattatgaatcaatataatcgattccgcgtcggatgaacgtttaacaacaaacaattccgccgtagattctaaaacttccatcggtatttctggatggaaaagtgattccgcttttcgtgtgctaattaatttcgttagcgcatcataagttgcttttcgtaaggagcctctttgttccaactctgctgtaatttccgccaagtcgtatttttttcgattaatagagcgattgtgacttgttgcttctacgcctaaataatcattgcggcttcctaaaatactttgaacataaacggctggaacgcctgggatagacatcaatactgcatgagccacaaggaatcttgcaagtcgcaaatcatctgtgtccgcctgtttacttagcgcatccatgtacgtcacgtttatttcataaggactcttagaaccatctggattttgcttgtaagaaacgagcgcaccttcttcctccaaatcattcactaaagccaaaatctcagcttctggaataattccgcgcactggatttaacccaatcccatcatgtgaggcaaggaaattaaagaatgtccgcttgccttctggtagctctaaattcttcgcccagttacggaggaattttgcattaccatgatggatagcatggagcacaagtggtggaagcgggaattgataaaccatatgcgcttctttttcaccatttccaaaataactaatattatcaacatgcggcacattggtttcggtaataataatcgtccccggagctgcaatgtctactaaatctctaaataatttcacgatttcatgcgtctcttccaagtgaatcgagcttgttcccggcaccttccacataaatccaaccgcatcaagtcgcacatattctgctccttcttctagatagaacattaaaacatcaatcatcttataaagcacttccggacaagcaaagttcaaatcaatctgatcctcactaaacgtcgtccaaatatgccctacttttcctgaatcaaattgaaatgttgtcagtactggtgtcgcgcgtggtcttgtaaccgaactaaggtccgtatttggatccatttccacaaaaaagttcctaaattcctcatcacccgctaaatatcacttaaaccaatcacttttcgccgacatatgattacaaacaaaatcaaacatcaatcgcgccgacttttccatttccttaatatctttccaatcaccaagctctgggttcaccgctttataatcaatgaccgaaaatccatcatccgaagaataaggataaaaaggtaggaaatgcactatctcaaaagccgattttaaataactatcatacatttttttaaaagttgttaacgttttttgggattcctctttaaattggtccccatatgtaattaaaacaatatctttctcgtcccactgatcttttcgcgttaactttcgttgttgcgtttgctgtacccgtgcttcgattctagctgccaaactatctaccacatcttcggcatataaccgcgaaagtcgttttcttaaattcgtcatcatttacctcctaaccgggagcgctcccacaagaagaattatagtatggaaagcgctttctgtcaaacacaatttttaacgtcttttctaacacgttgctaatagtgagtttccttacatagataacatctagttggacatttgctagaaaattgagtaatataaacatggatgataatgaccggaaccgataccggaaacaataaagagaaaggaagattaccttggcatcaaccatatatgatatagcaaaacatgcgggagtttcaaaatcaacggtatctagagtactaaacaatcaagctaatatctccgaagaatcacgaaaaaaagtactagcagcgattgaccaacttaactaccaaccaagcaaactagcacgcgcacttacctcttcgggctttgatgctatcatggttatttcaaatcgctctactacaaccacaaccggaaacccatttttttccgaaataattcaatccatttccactcaagctgagttggaaaatttcgacctaattcttcaaactgctaaaaacagcgaagacgaacttaaaaaatgcctctccaaaattcaagaaaaaatgataaaaggcattattatgctaagttctcccgctgatgaagatttttttcaccaattagacccatataatatccccatcgtcgttaccggaaaagtagaaggtcattacaaaaatatatactctgttgacaccgacaattttggcgacagttatgctctaacaaaacatttaatcaagcaaggccatcaaaaaattgcttgtatccatgctccactcgattatcacgtttcgattgatcgtcttgccggtttccgtagctgcctgtttgaccaccaattagacctacgtaatgactggattatagatagtggttatagcatagaagatagctataaagccgcactacgactaatggaaggccctgataaaccaaccgctgttttcgcaaccgacgacctaaaagttcttagcatttacaaaatggcagccgataaaaacttacaaatcccaacagatttttctgttatcggctataatgataaagtagcgtcatctttcctatcaccaccacttacttctatcgacattccaatcaataaactaggaaaaaaagcgactaacttattattccggctaattcatcaagataaaaatgttccaaaaacaaccattatccaaaccgaaatgattgaacgtgaatccattcagaaaataaatgcctaaacttattttctgattttactcggtcctgtagctcagttgggagagtatcaccttgacatggtgggggtcgctggttcgagaccagtcgggaccatttatcaaaaaagcatcccttttataaaggatgctttttgaattttatttaaataacttgcctaatttcttgaacaaaccatcctcaatgatatcaataccgataccccagttactcttgagaatttctttattagcttcaacatattcttccaaatccttctctttaatagtaaggttgtgatatggacgatattctaaataacaagaagctccgtttttgtgaattttcttcgtcatacgatggttcaaatacttagatttgatgtcacattcttgacgtgtgtagcgttcttgctgatcaattgatttatctgtcgtcaaatgaagttctgttttgatgacattccgatcaatccaatatggaaaatccttatgaaaatgtttttccgcaccatcatcaataaaattattccagttccaaaaatgtaaataacgctttttattttctacaatatatggatcggaaatagttgctttataaattatagaaagctcatttaagtctttattatcttccacaatttgaatggatgtattactaaaatgactatcaacttcattttcttcatattttttatataaagtcatattgctataaatcgcaaaattatatcgattgataatgtctttattggaatcatttttaaacatttctcgtgacccgtttgccattccatcgcgtaattttctttcaaaagtaatttcagccgcattatctttcacatcgcagtaaaccacttcttccacagatggaatttcatcttgaaatggctcttgtttttgcaattccgcccctggtttaatttccaaataatacataaaactatttttttgacgattagccaaaaaaccttgatcactactcatcgtagcatcgataaagtagacttgattattatgcgttatttttaaaatcgcatggttaaagttgaatggtgacggtgtataaactggtaggaatacatcactaccatagttaaccaaaataagctctgaattcacgcctaaataatctaaaatcactttcaaaagaactgttttcgctttacaatccccttgtttcgttttataagtcacctctgcagcttgaggctcatgaccatccatctctgtttcattatataaatagtacacttctttttgaacaaaatcgatggcatgcttgattttatggtctaatgtcggtaactcatctagttcagttactatatcagccgcaaattcagcaaggtttacttgatagaatttttgataaatgtcactgattgtttttgtgatttgcggatacgtctgctccgtaacaaaatcaacaaacggtgtaatttcaagttctttggcatcttctccaatataatcttctttttcgattgtataagattcgttatgttcaaccataaccttgtctttttctaaaatggtgcctgcttcatctcggaaataatggaaattcgcttctaatttcttctccgtttcatttttcaattcaaaacggtattttccataagcccagtatgaatttggcgctgaataaatccagcggaaaaagtcattgcgaatgctactttcttcatatttacgctcaattgtcgtttccacaataaagatatcatttaaatgtaagtcacgaataagtactgtcacttttttctcatcattaaaactcgcttgattttcatcacgaacatagtcaagtacttttacattaatgtcatccaatttatcaatcactttaccatcacgaacaacagataaagtgtgaatgtacaatacctcttcttctgataaaataaaactcgttttgccggctgaattgagcatattcggttcatttaatgtatatgccatcgaagtataactcgtgcgcgaatttggtttagccgtttctacgatattacaccagaagcagtaatcacgttcttgcgcaatctgtgcatcgtaaaaagttttatcttgtgtctttaaccaagaatcaatgttttcttgttttgtttcaggagaacttaactctggttttataaaataatattcttttgtcattgtgtaatctccttaagtgttttagataatcttattctagcaataagtaaatagaacaaacaaggcaaaatctttatgatatcgtaacttttggtttatctacactatttagtaaaaaaatcgacacatttactactaaatttcatctatccacgaaaacaattgcacatcttggtatgtctcaccaattttttcataatctcgcagtaaaccttcctccgaaaaaccaagcttttctaacaatgctatagaagcactatttcttgggtctacttttgcttcaattcggtgcaattcaaatgattcttttccccattccatcaacgctctcactgcttccgtcgcataaccacgtttccaaaagcgtgtacctaaatcataggcaatttctgcacgatggttttcatgatcaatataattaaagccgcatgtaccaatgatttcctctgttgcttgcaaaataatcacacatcgaagtgcctttccttcaatttctagttgtcgtagcatccgaatcatttcttcaaccggctgcaaactttggaaaggttcaatattcatatatctagtaacagaatcatctgaccaatagccaaacaatatttctgtatcagctaacgtcatttcgcttaaaaaaagtcgttccgtttttatcatttgcttccgattttccatacgttaacccccgcccttttaataaaagaagcttatcaaatcttactcgcaaagtaaaatgtttcacgtgaaacatttgctctttctttatcatccgagtttttaggtttataatggaaaatagctcaaaaagcttcaaaaaggagaatgattcatggaacagacgaataaacgtaatactttagcacttatttcaattatgcttggagcttttatttcattattagatacaacaatcgttaatgtggccttgcctgatattacgacggccctacatgcgacaagcgagacgattgagtgggtaatttcaggctatgcgcttgcttttgggcttgtacttattttagctggtcgacttggggataaatttggccgaaaaaacatctacattatcgggattacgctatttctaattatgagtgtgacagctggttttgcagattcagaaaatagtctaattatttcccgggtaatacaaggacttgctgccggattatttttcccgcaaatcaacgccacaattatggatatgtattctgggaaaagccttgggaaaatcttcggaattcttggctctgttattggtgtaggaactgccatcggacctcttacaggaggacttttaattgaactgttcggagctacaaatggttggcgcgcagttttcttcgttaacgtaccttttgtgttagtaacgctcgtcctagcaatgctttatcttcccaaaagaactgtttccacgaaaaaaatcagcttcgatttacctggagttgggctactgacaattgcactcttactattacttttcccacttatttcaaatggtgcaaatgatttcaaaccagtggattactttttaatggcgctatctattccactatttattattctttataaatggagcgtctaccaagaaaagaaaggaaatcagccattaattgcacctaatcttcttaaaaacaatcaatttgtttcaggtatgctcttatcgcttgtttactttgctgcttttacaagtattttctttgtcctatctctaacttggcaaactggcttcaaccggtctgctattttatctggacttgctattagtccttttgcattaggtagtgtgctcgccgcatctaatagttaccggcttattccactactcggaagaaaactcttaatgcttggagtcacactcgttattgtcggtcttggcaccgtgtctattgttttccatttgaacgacggcgctttttctgcttggcttttattcttacccctcttcatcgctggcattggtagtggtttgactattgcaccattgaatagttttaccctttccactgtgaccggtatagatcgcggcggagctagtggtatgtttaatacagcgcagcgaattggttcgtcctttgggattgctgttgttggctcagtctttttccgcacacttggaaatactgccgctacttcaaaagcaagcgccttttccgacagtttgcaaatgagcatgtatgtcaatattgttctacttgttgtttgtttcctacttgtattccggttaccaaaaaatatttaaaaaagagacatgactttgcgttaaagtcatgtctcttttcttatgctaaatagaaaacttcttttaaatctactgcaaccgggctgttattaggatttgatttcataattggagccatatatttccaccacttttgacaaatttctgtttctgctattttgtcataaatggctttatcctcgacttccacataagcaaacaatgtatccgttttttcatctagaaatatcgaatagttagctgctccatgtgcttttaaagcctctttcatttctggccaaagttcgtcgtgtctttttttatattcttctttattaccaggatataaatacataatagatgccactcgttccattattgttacctcctaattatttaaataacctgcctttgcttcaacgccaaatctttcacctagtgctttcaattgttcatctgtaatcgcttgtttaataccgccttgtgacatcacaatagtataaacttctgctgctttctccgcggtttcaattaatccaaatgtttcatccattgattgtcccgcaccataaattccgtgatgtggccaaacaattaaacgattttccttcattttttcagatgtagcttctccaatttcattcgtaccaggaaccagccaaggaataatcccaacaccttctggaaaaacgactaaacattccgtacacatttgccataaagttcttgtaaatgctcgttccgtcagctcatgtgtaaatgtcatcgcgagcaaatgagtagcgtgacaatgcataacaacgcggttttccggatccacagaaagtcttgcaatgtgactcataaaatgcgctggaagttcactcgttggcagtccgccgtctgtatagccccacaacaaatgaacagctttcccgtcttcactcacttgaattacacctaaattcacagctggagcttcttcaacatttttaaaatatttacccgaaccagttactaagaaatacttgccagcaagctttttaccatcaaagtccattggaattgtgcggatgatttgctttacatctaaatattccgcaacttctttttcatccaacaaataagtgatattgccaccgtttctttcatcccagcctaaccggtataaatttgaagtagttttcgccatttccttaataaaaacagcatccattatatcctttgtcatcgtcactatctcctatctttttagtaatacatcttcttcataagcttttacttccttcaaccagtccaaaccaactgggacaccattaatttcacagaagtagttccatacatcgccaaatgggaagtctttcaattcttctgtaattgccatacgagatgtaaaatcattttccagttccatttttttcaaatcagctgtaggttctaaaagagctttaagtaatgatttttgcgtatttctagttccaacaacccatgcagcaatccgattgattgttgcgtcgaagaaatcaagaccgatatttgtaatcccaagtaaatcattgcgcaccaattcgcgaccaatttcaattaattcatcatccataatcaccacatggtcactatcccagcggactggacgactcacatgtaacatgacgcctttactgaaaagtgccaaagaagataatttattagaaatgacttcagttggatggaaatgtcccgcatccaagcaaatcaatttatcccgcgtaattccgtaacccatataaaattcatgcgaaccgacagtataagcctctgctcctagaccaaacagcttactttctacagcttcttgggtatatttttcatctaatttttctgcaaaaacttcatctaaagcttccattaaacgttttctcggggtgtagcgatcaatcggacaatcttttataccatccggcacccaaaaattattaatacttgtttgaccaagttctttcccaaagtactcagaaatttttcgcgagcgtttcccgtgctctatccaaaaatcgcgaacttctttatctggtgaagctaaagtgtaattgtctttaaacattggatgtgaaaagaaagttgggttgaaatcaagacccaaaccttgttctttcgcccactctacccatggagtgaaatgcttaggttcaatttcatttaaatctactttttcatctgtatctacgtaaattgcgtgtaagttaagtttatgttttccaggaataagtgaataagctttttccaaatcttggcgtaattgcttaggagtatgagccgcacccggataattcccggtcgccatgattccgcctgtaagttcgccgtctggatttaagaaacctttaacatcatcgccttgccagcagtgcatcgaaattttaatgtctttcagtgttttaagcgctttttccgtatcaactccaattgcttgataacgttctttcgccacttgatatcgtttattaatttctgtttcttgtcccattttaaaagcctcctaattaaattcaagtaccttagtaaatctttcttttatttcctcgaatctcacatcaccacaagaaaattcgccaatttcaaatgaatttcgaatgatttttcttcccgcacgcatggattcgatttcgccctgattaatcatttgcacaactaaatttccaattgctgttgcttctgaaggtcccgcaaacacttctatccctgcaagtttagctgttaattgatttagcatagctacattacttccaccaccgacaatataaagcttttcgattttcttaccagtaatttcagtcattttttccaattctagtgcataatagagtgccagacttccatacacacaatttgtcagttcgccaatcgtctccggtacagtctgtccagtttctcggcaatacaatctaatctcatccaccatgttttccgggttattaaaccgcgcatcattgacattaataatttgcttgaaataaggataattacccgcttcctcggccatctcagcaaaactatgcttatagtcgtccatgcgcgcaatttcttgaacaatccaaagccccataatgttttttaaaaagcgataagttccatatgcgccccattcgttcgtgtaattttctttaaaggctacttcgttattgattggcgcacttagctccatccctattagcgaccatgttccactactcaagaatgcccagttttctccttctgctggagtccccaccaccgctgaagctgtatcatgtgttgcgactgtcactacatcacaattagggatatcatacatcttgagccaatcctctttcacttcacctaaatacgtccctgcatcagtcagtggcgcaaatttttccacatcaatgttcaaatgcgaaagtaaatccttatcaaataattgttctcgcaagttaagcatttgtgtagtcgatgaattggttgtttccgccaccttaacccccgtgaggacataaccaatatagtcaggaatcaacaaaattttctctgctcgctctagtaaatctcgctcttccacgtacagttggtatagggtatttaattccataaactgaatacctgtttttttataaatatattctcgtggatactcactcgttaaattctgcaccgcatttaaagttcgtttatcgcgataactaattggatctgccaacttctcaccggaagcccctatcaaaacatagtcaacgccccacgtgtcaattccaagcacacattccgaaatccccagttgctttactttttccaagccaataaaaatttcctgcattagttgatcaatttcccagcgttcgtgtccatctcggtacgtaaaaccatttttaaaacggtgaatttcttctaattgtaatttttcattcaccaatttccctagaattaatcgaccacttgatgcaccaatatctactgcaacataatgtttcactggtctagctccttttctttaatcaattgtatttccgtaacgttccttcgtaatatcatcaagtgatctgccacgtgttttcggcgcccaaattacaccgattaaaagcgacactgtaagtaaaccaatcataattgtccccgccacagtaaagccaagatttgccaagattactgggaagacaatcgaccagacacctgtactaccacgaactaagaaaaacatcacgccttgaaccccaccacgatattttgttgggaaaagttctgtggaccaaagtgcgtaaaaagcttgtgcaccaatacctgctgaaataccccataaaataacaaatgtccataagccaacccaagacattccaacaaaagtaagtacaacccaagaagcaactgccattaaagcccctacaaaaaacaacccacgatgacttactcgatcaccaaatttagcaaagccaaagtatgtagaagctgctgtgagtatccataatacagcttgcaataaattcgcttgtgtattagaaagaccacccaccgtttcatatacaaacggcataaagaatcccattgcacccgctactaaattccaaaataagtacacacccactaagaaaagtactgattttacatttaccatactagaaaatgctgttttaaaaggatgttccaaacgattaccactttctttcattttcacttgctccgcttcccagtccttcgactcctctagtttgcgctgcaactgccaagctacaaatgctacaatcaataaagataagaaaagtaagcggttacctaaaagtccaagtggagatacaataattcctaaagtaaagataattgctggcccacatgaccaagcaaattgagatataccaatatttctagctcgtatactaggatccgccatttcagaaatatatgtccatgaagccggaaccccagcccctacagaaaggcctgtaactaaaaacccaattaataacattgggaagttcatcgcaaacataataattgtaactccaagcatatacaccaacatgttatacgtataaataaattttcgtccatatttatctgctaaatgaccaccaataagtgcgccaattgcagaaccaaacgcattcgcgctcacagccccaagtaatcccaccgcaaaactgctaagtccgaattgtgttgcccacaaagttagtccacttgctcccgctacaatacatccagaatctaaatagttcgtcaaagatactgctatcgttccttttttacttgtactcgatccagccattcttttaaccctcctactcattttagttaagcgcttactttatattaaacaattaatgattgcgctttacaatatcctgtgtttataattaaagtatcaaatttacagaaggagattgtgaaatggaagcgcttaataaaaaattatttcgtctaaattcaaaagaaaaaatccaaaaaagcactggcacttttgttcccgatttacccaatggatcctttttaaaagagaacggcagcatggaattattaaatgattatttcttcaaaaacaaagacatttatataagcaaacacaaccgatttgccgactacccataccatacgcatcaatttcttgaactaaattacatgtattcaggaagctctgaacaaatcattgaaggaaataaagaaactttacatgaaggagaacttttacttttagacagcggctgccatcattccataaaagcaacaggcgaaaaggacattctcatcaacatcctttttcgtgaccaacaaatcagcctagaatggctaacgagtataaagaaaaaaaacagccttctattcgactttcttcttcattccagcgtaagcgagcaatctttaaagaaatatattatttttcaaagtgcgcaaattccgcatatccaacaaattttaaaccaaattatcacggaatattttttagaagaagaattttcatcacgaattatcactctttatttgccaattctgttcactgaactggtacgtaaatgtgatacatatttagctgatgatcttaccaactcacaatcaagcaccacttccaccatgctcgaagttattaagcttatagaatccaactatcgcacaatcacattaacaagtgccgcggatacattaggttacaataaaaattacctcagtaactttattaaaaaaaataccaatttcacttttaccgaactagtcaataaacaaaaaatgcttgcagcaaatcttttaattgaaaccacttccactccaattgagttgattattgaaaaagttggatttagtaacaaaacttacttctactccttatacaaaagaactttcaatctattacccaatgaagtaagaaataaaaaataagcgtactgcatgagtcgcagtacgcttctattgtttcacgtgaaacattctatttataaacaacctcaaactcttcacaaacaaccagagcatcttcttcaaatggaatacctaactccacgcattcattagtgaaaaaggaagtatgtacttttcgccaatattccagcgtccggtctccttctccttctaagtaagcaaatgtttccggcacttcattaaaaggcataatagttacacctattaacttgataatccccattgcttcttcattaccatctaaaagcactacatgtgaacccacagatggcattgtttccccaccttgatcataccaatagaacaagctgctcgtaccggtttttatcccatccataacaagcccaccaagctcatttgccatcctagctgagttaccaaatgaccatgcctcaaacttacttgtaatcatcgggtgctctgcccggtatttctgccacatttcatgaaccgaacccttataaactaccacttgagtctcctcctaaaaaaagactgaggttcctaaaaacctcagtctaagaatttattttcgaactggcttaatcacaatataacggtaaggatcgcgtccttcagaatgcgtttcaatttgttcattctcgcttaaaatagcatgaataatttttctttcaaatgaaggcattggttctaaatgaacagcgcgcttcgttttaagagctttatctgccattttgtttgctaaaattactaatgtttcatggcgtctttcacgataatcccctacattaacaataatgtttttgtattggctcgttgttttattagcaattaattgtgttaagtattgaagagcattaagggtttgaccgtgtttgccgattagcatacctagactgtcacctttaatttgcaacttcacatctttaccaacttcttctacatcgattgtgattactgcacccatcttggtagcaacatctaaaagataatcaatcgctacttggataccatcttctttttcaattacttttaccatagccagtcttgaaccaattccgaaaataccttttttaccttcgtctagaacttctacttcgaccttgtcgcgtgttgtttctaaagtggctaatgccttttggatagcttcttcaacgtttgagccttgcgcagttatatctctcactttcttttcttacctccttttttggaagccttcatgttagctgcttttttcttcaaacgatcttccgcaacttgagcagcagccagcgcctcctgttcgcgtttgtttttaaaaggattattaattaaaagtgtttggaatacggtgaaaatgttaccgataatccagtatagagcaagagcagacggtaatgtaatacccataaatagaatcattactggcatgatgtaaacaatcattgccattgatttattttgctgtgtttgccccatcatagaaatttttgatgataagaatgttgttaatgccgcaacaaccggtaagatgtaatatggatctggatttcccagttgcatccataagaatgaatctgttttgatttctgctgttctactaatcgcttggtaaaatcctagtagaataggcatttggattaataatggtaaacaacccatcattggatttacgctattttcttgatatagacgcattgtttcttgttgtagtttttgttttgtttcattatctttagacgagtatttttcttgtagttctttgattttcggttgtaagtttgtcatggccttttggcttttcagctgtttgatcattaaaggcatgataagtagacggattaaaattgtaacaacgataattccgactgcataacttccaccgaataaatcggaaaaccaagtaatagtccaggacaatggaaatacaatgtagtgactccaaaatccagttgattctgatgtaattggatcagttgaatagccacaacccgaaagcacagccattaatccgattacaagacttgcgatgagcaacttctgtttgaatcgctttttcttcttcaaattgatgtaacctccaatttcgcctttttcaaatttccactcactttgaattgtttggcttttgctttaaaacacgccccacttttaaaacatgaatcaaacttttcttcacttcatgaaaatccatattggccgccggttttctggcgatgataatatattcattttcaggattgatttggctttctaattcatggaatgattgtcttatgtaacgtttaatccgatttcggcagacagcgtttccaatttttttactaaccgataaaccaattcgaaaatgattcgatccttcttgctttaaagtataaacaacaaattgacggttagcaaaagattttcctcttcggaatactttttgaaaatcgtcattttttttaattctatatttttttttcatacattctccatcttcttacatatcttagtataaggccgtttgactcagagatttttcaaaaaaaaaaccactgagtcgttttcaggggtctacgcagataaaacttttcttcctttacgacgacgacttgctaaaactctacgtccgtttttagtactcatacgcgtacggaaaccatgcactttttttcttttacgtttacttggttgatatgttcttttcattaattacacctcccatgaaagggtccaatcgaatttatctattagacagtcttagatattgtacgtgaactggtcttttttgtcaatactatttagacgaatttctatttagactccgttcactatcatatcatatttttatagagagaaaaaccatttttcgaaaattattgcgttaaatagatatatttttctctcgttgtgtctggaatagtaattttacgacccgaaagctttactaaatatttagcaaactccccgattttctcaaattcagcaggatattcaaaaattagtttttcctttattaaatagttatcaacgtaatggcttgtttctggctgaaaagataaaagtccttctataaaacgaataactttagtaaattttggaatttcctgttcttcctctaaatcagtaaagtggaaaaacatcgtgtaaatatgattttttttgatattcactgaaaaagcttctttatttatattactttttgcaaataccttaaaatcgtcaatttctgctggttcccgtttatcgtgaattaataagtatccaaatacgtcgtcaatattcccgttttgtataactcgataaaactctgtatctctagttttcaaaagccgttgaaatatcatttttcacaacctcatttatttgtctttttttcgtattcggtaaatagtttaacacattggcgcaatgaaatcctttcctagaaagtgtggataactcctgaataacgcctttttattgtggataaccttttcaattagtttaaacttatacacaattagtggttaattacacacaatggcttgtgga

SEQ ID NO: 2 - protein, 98 aa, Listeria monocytogenes
LKKMGFILICCLFVCASPFYVKANTDKATSKAGVIFTHDPRKPKTGTDDRSGTFPTKVPPKRLPKTGDTADFYLVLLGVGFILIAKKGYFKEVREEIR

SEQ ID NO: 3 - protein, 673 aa, Listeria monocytogenes
MKFNWKVVLLFVLILAFIVPVYSKAVETGKEVPKSPELLDDKSSTLKNVNTPKNLKASPLTIPANSTIADLFPDEGMAKTIANQLGRTENNNFQTPTKTDWKVDDVVTEVELNRMWYLTSVATIGSIEGIQYLPNLYDVRLQFDKQCKDLSPFLKAPNGYSQLYRLNINNGNISDISPLTELSAPTLNDIDLGGNNISDLSLFPKLPNKFPNLEEISLERNNISDVSPLAKFASTKIKIFNLDENHITDLSSLTNNKMPNLQRLYVRYQTLDMEPVVTSSKYEFSIQPSIFGTTKPVKITATKPKATIDPITSKITYSAEEMAKKPFYYTPLFPGVTYSWDENFPLNGSNSLVDFRGTITQPLTYIEPPQVVSYNSGLTYEIGTSLTEQQFLNDVNLITDQPTTITSDFDVKLKNLNTVGIYWVAVKASNIEGNAEANIMVTIKYKPPVITADAEYTYLVGDKVNATQFRADVNATLTGEGTLRDDFIYKVRLNTAGDYVVTLTSPKSGYYEQDAIPVTVIVHVKELLELQIPDEFRMDIDANADSVPISDKKQTLKCYGSSGKAELEVIDRRTVRQGWTITGAMTPFTNSGGDVLQTSLKYQSKAPSSSPIYLNTTNQPIEKKQSAVTDPKYDSTVFNLEDSLSMEIEPNDALVNDSYESKITWTLEDAPRP

SEQ ID NO: 4 - protein, 851 aa, Listeria monocytogenes
LKTTKIVIASLVSLTMVSNPLLTFAATNDVIDNTTEITTDKETSSTQPTIKNTLKAGQTQSFNDWFPDDNFASEVAAAFEMQATDTISEEQLATLTSLDCHNSSITDMTGIEKLTGLTKLICTSNNITTLDLSQNTNLTYLACDSNKLTNLDVTPLTKLTYLNCDTNKLTKLDVSQNPLLTYLNCARNTLTEIDVSHNTQLTELDCHLNKKITKLDVTPQTQLTTLDCSFNKITELDVSQNKLLNRLNCDTNNITKLDLNQNIQLTFLDCSSNKLTEIDVTPLTQLTYFDCSVNPLTELDVSTLSKLTTLHCIQTDLLEIDLTHNTQLIYFQAEGCRKIKELDVTHNTQLYLLDCQAAGITELDLSQNPKLVYLYLNNTELTELDVSHNTKLKSLSCVNAHIQDFSSVGKIPALNNNFEAEGQTITMPKETLTNNSLTIAVSPDLLDQFGNPMNIEPGDGGVYDQATNTITWENLSTDNPAVTYTFTSENGAIVGTVTTPFEAPQPIKGEDVTVHYLDDKGEKLADDEVLSGNLDDPYTSSAKDIPDYTLTTTPDNATGTFTTTSQSVTYVYTKNIVAAEPVTVNYVDDTGKTLSPSEILNGNVGDTYNATAKQIDGYTLSAEPTNATGQFTSSAQTVNYIYTKNPAPEKGVVEIHYVDEDNKQLNSTTEISGTIGDNYTTEPKTIEGYTLTTTPGNATGTFTTGSQTVTYVYTKNIEAAEPITVNYVDANGKTLAPSETLNGNVGDTYKATAKQIDGYTLSAEPTNATGQFTSSAQTVNYIYTKNTNTDQPLPTKKPTNTTPTKPSNLKTTEVKKASDTLPKTGDSAPWKSALLGVFLSSTALVIWKKKK

SEQ ID NO: 5 - protein, 638 aa, Listeria monocytogenes
MKKAFLCLSAIVLSLNFVWINPITGSASKIETTKETNQQVNLKNNVTDIVTSEDLGGQTWLINEVNRQLAPKTVDVNLTFEDLAKITTISLNNRSLTGEVPPEIKNLVSLQRLYLFSNKLSGEIPAELGELTKLTELRLDYNELSGKIPDGLGNISEIALQNNRLVGQIPLSLYENRTGKNEVNVSGNQVTINSQQSEPSVYSAYTFVYPSSTPEYSGHIKANNSFISNLTNDMNLTPFLKNSPTFINLQVVYMFNSELFDGHDVTITDTNDGRVLYDGTLTSDISIPLTNFKSGVHVINVMLDNAPNNPQNQTTFLIDILPVPAHDLTVNYVDEAGAEIHEPQTVSGNVGDDYDVTTPEFELAIDKYELDTEQMPTNGLGTLSSEAQTVTYVYKKVNGAPVTVKYEDQNGVEITTSDVLTGKLDATYQSKAKEIAGFTLDNSKLPANASGIFETNPQTVTYVYQAVPATIKAHDSTIYVEDKWSAEDNFDSAVNSVGAAVSFDDLEVEGTVDTTKAGVYPVTYSFAGESVTINVTVKAKDLPAPPVTPTKPVVPIQPTNPDQPDIQAAPGEHQASTDKSEALKVTVAQKEQPTVAGNLKLPTTGDNLWDSVLYSVFGLIAVCVAFSLFFWRKKQKHS

SEQ ID NO: 6 - protein, 315 aa, Listeria monocytogenes
MKKFHGLILTALVTCLIIPFSLAASAETNENGNNSTPTEEKTTDTTENIITEEKTEPAEPTKDTTVTPPQKSKVQTTIDITDSQEVYSYEQNSKIDLKDFTATLTDYTDTKLTNYRLAANSKLSTAQTGIQEVTLLGDNEDGKTTAVKLNYLVKEKTAQLTITDMNFDLETKIFTGKTKPFASVYMSSPADENFGEGTTTADKDGYFYAEWATTPKQITAYAFDESGNYSEEVTYQVPAKKQNEAVVTAPDKVKKIETKNAVKSATTKPTDVTKVTKDDKTDLPSTGDKGTEWIFVVAGVIVILVAVLLLRKRKK

SEQ ID NO: 7 - protein, 2044 aa, Listeria monocytogenes
MIKATRARHYLMLLMAFFLVLGQLNLTALNVFAKENGNDELTYEVQSKLTEDKKSADLTIKVTPKSDQVKILTIETPDGEKREGQEVSYKAEKNGTTNFLINYQNTSEEKAETKTYTASYEVSDIVSEDGVNKDSDTEKATEKEDANIQPPSTTNNTKNIKSLKSGQTTVELKIPDYDQTAWANGDIKEVTATVNFGDSTSTGKKVNFTLPDGMRFVSLPVPSNYQAGTNEDTGVLSYLGASDPLGIAITSVEVPNKETAYSQATFGTVSYELSPGTEKASFKFSVRVDAAKYYGPTDLADPIKTEVYKGEASTPVASADQAIRAEGNKVVGYADQNHVKTMFRTWYNDQRLSEVLASTDTTDSYNYTKSYSVVNGSNSLDSRGAAVYIAKNIEVTLYYPEGMEFVNVVNNAGTVLKENSNVTITNYPSENKVVINNKHLNNSATSNSIYGVKYKVPKGTPAGTYSTAKAPHAVITTYDGEVFESDALTTNPNDLTTIAPLDTCKVVDTTENKMTLTTANGQLNPNNETWAGSIQINNKKSAGVKKNQMYQIKFDPNWEAYMVNIPFDSTISGNKISEVQYKTNLNDAFRTFDGALIKNNNQMYRLDAKAVGLEEGEYFTEVKANVGDFAPGYQSTEASATYRWNSTASYGKIKPGVTSVQYEGAIWDADDESNTKVSGISTYKVSSAESTVANGTAAFYNKAGTKVKTASAGETINTKATLVLHDYPYGTRTVLNDPEVYLHALEGTTIQPSSIKLTDQGGKDVNFTVEQETANNGDKVYALKTTDVSVGVYVGYPTKHKYLNISYDTTFDVTLNKSINMDAQQVIAWGANVTPATGTNTFSDLGLDVNKNGRDNDKLLSVNSSTLSIPKQDTVTVETFLSVAGEGDKAAYMEGEDSTVSYFSPGTDADYTVKITNTSSGNASTFELYIPIPKTGQDFGSKFQSEPFKWDMKLNGALPVSAEQQDQFDVSYATTATGDNYDSTDIYSNTVADYEKVNMVRIKVKTQINAGETQTFKVPLKVDETFDSATEGNKIGERDIYNPYYRVITNTFAGSLSGTKVGAELVIGEVAGMLFNDKDVNGSYEKDKGDEPLANETVELYKWNVSTSEYEPAKVGDKNITATTDSNGKYSFDYSDGVGYGNYAVKFPDKAGYQYTLKNIGKDTSLNSDVPYSGADRGWAKQINPTLPSSQYTNAGYYAYNPTQDLKVNLDEKQVQMGRSLEITLPKVASTTGQAAEDTIEPSFFKNIKATTNGYKWTVADTKVATVQTLADGSAAVVGVSTNNKTIDVTDLTITIQDIFGTEKSSKAPVYVTGTDGTVAQQDGYTMGATDFSLEYKEATDLTKAQALTLAKTAAFEEVKDGVNSSAEDRLDQVQVNQTQLDAIKNGSNQGGVYPLTYTITKDSKTVSVTIQVTVAKDLTAVNAHDSTIYLGDTWDAEDNFDSAANKEGDTNVAFSDVTVTGSVNTAVAGSYPVTYTYNGVSKKINVTVKDKLTAVNAHDSTIYTGDTWNAGDNFDSALDKDGNSVAFADITVTGTVNTNQAGTNTITYSYDGVSKTITVTVLENKEGISAHDSTIYVGDAWNAKDNFDSAFDKDGNAVDLEDVTVTEKPTVDTTKAGAYEVTYKYGKVSKKITLTVKAKLTAVNAHDSAIYIGDTWSAEDNFDSALDKDGNSVAFADIEVKGTVDTDKVGTYPVTYTYDGVSKTINIQVKDILTAVNAHDSEIYIGDNWNAKDNFDSAKDKDGNTVNWKDINVSENPAVDLETVGVYQVTYSYGGVSKTINLTVHPRKTSLEVHDSTMYTGDKWKAEDNFDNATDKKGDQIPFKDVTVTGQVDSKTAGTYEITYIYDGLKKVARITVIQNQAQITVKDSVIPYGGKWEAEANFIGATNRDGVAIPFSKIKVDGTVDVNKAGTYKVIYTYDPNEGTVDAGKKQLSVTANIQVEAEIVKPIKPIKPIKPIKPVDPSKPIDPKKPVKSSNPTKPSTEKTPLKVVDNKQHTRTYEEAKPLPKTGDQTNTWVIWTGVCLLSMSLLLWVVMRGRKKNYQ

SEQ ID NO: 8 - protein, 334 aa, Listeria monocytogenes
VSKNVKKIVITLFALIMTVGLASGFIAPIKASADTNNFTVKVEYVDADGAEIAPSDILTDYHYVSTPKDIPGYKLREIPHNATGNITDTGIIVRYIYDKTIDVRYVDETGKDLLPVVEIINSEAAVLETISDYTFVKKDISIDGLHIIFRYKKNISTIPDFGKPNQVTVNYLDENKTPIAPSLYLSGLFNEAYNVPMKKIKGYTLLKYDSEILGVFTESPQTINIIYQKKAPEQAPSMEPLPDPTVPESPQVEKSKIKKSKIETTEKRTTSKVKIAPKALKLTKVEQKKQETKDSLPKTGDSSVNLLITCLGIIAISCGVYLLVQQSQKRRRKE

SEQ ID NO: 9 - protein, 334 aa, Listeria monocytogenes; identical to SEQ ID NO: 8

SEQ ID NO: 10 - protein, 462 aa, Listeria monocytogenes
MKKRWLVFAIICLIITGFLSPKAEAATDYGSSFFTNVSLQNQNGEQATNFKENSKVRVAYDFVITQPVASGETMTLTIPDQLKLINYGGFPLMDSQGNTIANATIDQVTGTITLTFTDYVNTHTDLSGSLFYNATFNSKNIQTDQVNPIAFPVKNTTQTVTPYISKVNSGGGTGSPTIVFKQGRMDDKDLSILHWTVTLNNALTPIDNAVYTDTLGSGQNLLGSATIKYRDANKKVIATNIQPIALDADRNFELSIGALNNQSVVITYDTKITTKQKSYTNKATLSGDNLDAVSRNATVNDYGSGGQGTGTPPAPPVKEEPPFIPAEKQPIEKTVETDFGPLEIVKDSEQNGKIKVIYKVKDGDTLPGVANKFDVSVAEIKDWNNLTSDTLQAGQKLQLTIEKTLLSKITVPPVQKVTSTTRVDGVVKATGVLPHTGDSNPFIPFVTGLSLIALGFTFGRKS

SEQ ID NO: 11 - protein, 589 aa, Listeria monocytogenes
MKKMGVKIGLCILLIMPFTISFSANVSAEENISIKAAQDVVNIPDPALKSYLNGLLGQPSTSDITEAQMDTITDVTISNASLTDLTGLDYAHNLTILHLTNTGVTDYSLVANIPSLTNLNISGSNLTTNSIPDLNGLTNVTNLNLSSGKLDNSALTKFNKLPNLTFLNLDNNPSITDFMPLKSLPNLASLFIQFCGVNDFRGIDSFPKLTNLAAFGQNVGSAILINSTIKSSALNYNEANQTIFVPFTLMTERSMNFDGYLFPFTTNTASSSTYFTLNGVQISGSRLSIDDTGVTVSGITKDFFDSITKMEYNAFYDNPAGSYNSPPNFNSYSVSSGTYDHYFDIDHSLTITNDSAISYGEQTTVTEEQFLKDVHAETDDGTPVTSDFNTIVDFSKPGVYTVTLNAENAAGLKATPTQVTVTILAKPVITADKSISYTKDTTKTEQQFLQDIAAKTSDGSKVTSDFDSVVDLAKVGTYKVTLNAVSADGLNADPVIILVNVVAGNEPPTPPGPGPDPTPDPTPNPNNPNINPNPDNGQSAKSEIASNPSNSEVNIALPNTGDASQATTVLIGIILAGVAILFFRKRKHS

SEQ ID NO: 12 - protein, 1582 aa, Listeria monocytogenes
MLKHNWQKVFVVMVAVALIFQLVPWSNIFAGAEENQTKTTQQIAQPDDQKVADENKTTVTPDNKETTKNLVNGKQLLKGSVDWNFTNKVTDANGNTKETYAPGDSLKFSVSLAIPSYSEAVLDETYTFWIQKDFFQGDKVTFVNPAIDGLTPRQNVFTDDSMKNSIGTKTINGVEYIGYTLKFNQSPEALAKYEDEPLTNAKFDMFATISTTITTKEDYKAIVIEDDKDVDISNIEVPVTPPTPDTDNGVLTASKVIDSAWRLDKDTGKYVKVATSSTNYTPEKDDLVFYYVYAMNNSGENAVLEKMIDELPAGFSIITEGSPEWQALSTASGSSLQRGWVASADQTNLAPGATRYELPFSPAQTISKNGGGIYRTIAAKVTDPTKDLTNVTKSPTKGGEGKSGSITPSGKDVYDMAITTKISSTYDKNNKYIGAVSSTTTPVSISEGSTVGVTYTAINQGNYTKDVVVYAYVPAGYELNNDTSDFKTANDKWKYETTVPSGGGVWSDIKVYSITLSGGMASGATKTATMYMKAMGIPEDGTYSAVDFYMAGEIGSFSNFNGESTLDGAITDVDSTPDMNPGNDLISNVDGSTIKPIDGFQKEKPHVVKENAKSTATLQDEDDFDFDYVTFIKTPEVIPSEGKVFEKTRLSAADAEKTARNMIGNDIMGSALKDYTPLADDGRITSPKTYMVYEMNINPSGVEDTLNSSFTDTLPKGLKMLEYDIAGLNSSNKHIYGFTTNKFEGTPKFTNADGQDVIVYQKGLYSEKQVCIANPTLNDVGVRYFGNNADKMGVTGSVTKDARTLTLNFGQPAADPMYSETKAAYKVYMIVVIDPDEIDYSSIMQNKATYTYNDKVITSYENSEMYWDAGGGTAYAKKYVLDNKTNAYLSGSQYNVATPDADGNLSVGYKIRVRSAYEFDKSSINIGDVIAADNFKSISNVEVNGYEASPNTGFQIDGELENPVPLTADKYAVEAKATANTLDITNPVDIPQMQLYNVLFKVNYQKVKYGAKLVNQAAGSEVATVVPLNLNLLKQDDISKTALTGYEFKAYYADENGKADLTKPVKDTNSNEIVMTDSSGAANFIPNGYKTTSKNQEWKVVLVETKTPTGYESNENKEYPVTVKSDANGNLSIPTSTETGLEITNDDHGAATATIDNHADVKMIDVNGAKTWTGDTAADRPDSIEVQLLQDGVAYGSPITVTKADDWKYEFKNVPETNADGNKYTYTVLENTVTNYTSAVTGLDINNTLIKPDIKMINLDGQKTWKNDTENDRPASIEIQLQQNGQDYGFPVTVTKANNWKYEFKNLPETTNDGAAYNYTIVEKAVPGYETKVDGMDVINTKIDAPKTAVSGEKTWKNDTAKDRPDFIEVQLLQNGQTYGDPVKVTKENDWKYSFKDLPKADANNQDYRYSVAEIAVPGYKTTTDGMNLTNTKVTDEKNVTSASGTKTWVGDNEKTRPDSIEVQLLQNGKAYGTPIKVTAKSNWKYSFTNLPEKDKTGEKYSYTVSEKQVSGYSVKVKGMDLTNTKVTKTTPKDTPKDTHSTNKPSKTKKLPGTGDTNGMLLFAGGLALLFLGLHLRRKSAK

SEQ ID NO: 13 - protein, 101 aa, Listeria monocytogenes
LKRKLVLAMVLISFCGMFLLSPERVQASQTVVEVFISEDDLDVSEENIQEIPKKELAASSDKDNKQHMLPKAGDTVTNYTLLGLVLVLIWLIMQRKRKKKE

SEQ ID NO: 14 - protein, 605 aa, Listeria monocytogenes
MKKALKLFLATICMFIMIYPSTAAHAEETNIVNIPDANLKTYLNGLLKQASDAPITKTQMNTIQTVTLSGSTYTDLTGLEEAGNLVTLSLNNTNIQTLEPIKNQTSLTYLTVGGDNVKDSLFVDLNGLVNLQSLSINGSEVTHNVFKTFNKLPKLTYLYAQNSMKITDISALASLPALTTLFLQFDGIDDFRPLNDFESFKNGNLKALAAFGQNTGRTNPRITLKSGKLDYNETNQTLYLPFSMMPKPLTSFDGTVAPFSKSTSASNTYLGFNDVALPSSRLSITDDGITVSGVTKEEFDNLDEIEYNARYDFPTGSYPTPPSMTSYTISSGTYDQYFDISHTLDLTADESFDYNQYDTTSEEQFLKDVHAETDDGTAVKSDFDQVVKLDVPGEYTVTLNAENAAGLKATPVTVKVTVHEKPVITSDSQISYKKETTKSVDEFLKEIHGSVTGNAVLTSDFDKVVDLNTPGEYTVTLNAINDRGQKADPVTVVVTVTTSDSGHVDPVPPTPQEETDQTIIPEPQSETTEDSVKEDQAKDGQAKSEEKADKTSLTTKENKVEKSEKTNQPKTKALPQTGDTNKTALPIAGVMLSLAALLIFRKSKS

SEQ ID NO: 15 - protein, 508 aa, Listeria monocytogenes
LDRKFIKPGIILLIVAFLVVSINVGAETGGSRTAQVNLTTSQQAFIDEILPAAQDGYRDGKLLTSVTLAQAILESNWGESGLSQNSKNLFGIKGTYKGKSVSMGTMEASGSTTANFRVYPSWKESIEDHTALITENARYQDAVDETDYRKALQAIKDGGYATDPDYVSKLVAIIERYNLDKYDVIYDKIESNQSLAAIGTVAENKKQEVIWSAPYNTENANKIGTLENYSGRNLEISWEAKTEKGLWYFIRENNKDIGWINSNALKISYHQKEDENVHLTKYVDDLSAHVYRLPSPEKQFDNGTIAKYDRKALQVDKKITRGGYAWFRISEGEKVIGWVRADKLNDRLYDRITEQTSYDGYALVSKSATDNVWTAPFNTKNAEKLAPLADYNNEKLEIVTRAKAGNTLWYQFKVDGKLVGWASEKDLNVFYTTAKEEPVKQVAYVKDPTAKLYNKPVESTSTNPKAVGFYYGKLLAVDKTATILGEDWLHLKDSQNSLGWIKAIDINS

SEQ ID NO: 16 - protein, 439 aa, Listeria monocytogenes
MKHAKKSLFTFIIFMTILSITFNPFSAKAAPLMLNLPAPQVDQLYIGDDYITGKLQQEVPMHYPGNAAYVLFNNKQYNITDYTVENDVNFRLKLPKTLEAGDTLNYFTITGNVLDPVAYPGQESYKLAGPFSPIEKANIQVNYVDETNQTLATSDTLSGKLGETYTTSPKAIDGYQVKETPTNATGTYTTNTETIQINYVYEKTAVEGANVSVEYINEATNESIAPTETLSGKIGTTFQAEVKEIDGYELSQVPSNQSGTYTDQTQSVIFKYKKITTPDEVAKDVTVTYKDTKGNQLADPVILKGDIGSTFETEAKSFKGYKLTKTPSNHSSVFTSDSQEVEYVYSKDDAVITPPVTPVNPDKPIINPVKPVNPATSTVPNKNISKKNTTKTVNQTGKTSTALQLPKTGDSENNLPLIIGVSLLISGVYIFTTRRKRVK

SEQ ID NO: 17 - protein, 593 aa, Listeria monocytogenes
MMSIKSNIMKIGVCSVMVLVPLSQTSLPSFAAEEIALKESQDVVNIPDPQLKKELNLYLNQAENADITEAQMATFRNITLNSGIKDLTGIEYLKNITTLSINNINASYEPIQTLSSLEKLVINGENVNADIIPDLSVLSNLTFLDLSRTNIDDTIFSKISNIPNLNKLDISNNKGITKISELNNLPSLQELRVSDCQITNFKGIEKFPNLTAFYGDGQLFGIDSFETDGFKNIKSSELTFDANAKTLFVPFSIVTVNTILNYDGLSLPYNTNPDYTSIALGDQSYVVTNDKISINQQGITLSDFTQADFDELEAFEVYLGFDSGNISKPANLANGTYSLKQIGSYRAFSVDHSVNITAQDNISYIQNDTVTPEKFLTDIKADANGGTITSDLTDKVDFTKPGNYTVTLNAQNTKGLKGEPIQVTVTIIEKTVITADPEVTYDLNEAITEEEFLAEIKATTNDDTMITSDFESAVDFTKAGEYIVTLNAENDTQKAAPLTVKIRVNPKLPDPVVPIPYPDPTPDPTPDPTVPVPTPEDSTSDDGGVQHSNSRNPRISISDSSLEKLPKTGDSLPESGVLLGFLTLALGIVIRKK

SEQ ID NO: 18 - protein, 598 aa, Listeria monocytogenes
MSVKSNIVKIGVCFAVLAVPVSQTTLPVFAAEQPGLKASQDNVNIPDSTFKAYLNGLLGQASTANITEAQMDSLTYITLANINVTDLTGIEYAHNIKDLTINNIHATNYNQISGLSNLERLRIMGADVTSDKIPNLSGLTNLTLLDLSHSAHDDSILTKINTLPKVTSIDLSYNGAITDIMPLKTMPELKSLNIQFDGVHDYRGIEDFPKLNTLLAYSQTIGGKKLINSDIKSSKLTYNAENQTLYVPFSLMTERTVNYDGYVPDFVKSTASSDTYFTMNEQQVNGNRLTITSDGLTVSDVSKTDFDNLEKMEYNARIDLSYQSYNTPEQFQNGGSYTISMPIYDHYFTVDHSLNITADSEKTYIENQLVTEATFLSDIHAKTDDGSTVTSDFADKVDFNTPGTYTVTLQSENNAGLKATPVQVNVTIKAKTTITADEKITYKVDTSKTEAAFLADIKATTNDGTAITSDFATVVDLSKPGKYVVTLNAENDLQKALPVQVMVIVEKETPIPDPTPTPTPDPTPTPDPSPTPNPVINPNVNKPEVPSYKIPSLTVNEKKAKAEPSKEALPKTGDSLPVAGATVGFLLIGLSWFVSRKK

SEQ ID NO: 19 - protein, 1778 aa, Listeria monocytogenes
LKKKFSIVIISVLLLGYLAPFDTLLVGADETTVSEDTAVKTAEADSATEGIESETGSDDETAEEPKEAKEAEASKETTEKEEKAKTEEPASNIKTEINTDKSQLKQTSLKAAVPAGSTYNSLFPDDNLAKKLAVIITGNAAATGNESVDSAALLAISQLDLSGETGNDPTDISNIEGLQYLENLTSLNLSENNISDLAPLKDLVNLVSLNLSSNRTLVNLSGVEDLVNLQELNVSANKALEDISQVASLPVLKEISAQGCNIKTLELKNPAGAVLPELETFYLQENDLTNLTSLAKLPKLKNLYIKGNASLKSLETLNGATKLQLIDASNCTDLETLGDISGLSELEMIQLSGCSKLKEITSLKNLPNLVNITADSCAIEDLGTLNNLPKLQTLVLSDNENLTNITAITDLPQLKTLTLDGCGITSIGTLDNLPKLEKLDLKENQITSISEITDLPRLSYLDVSVNNLTTIGDLKKLPLLEWLNVSSNRLSDVSTLTNFPSLNYINISNNVIRTVGKMTELPSLKEFYAQNNSISDISMIHDMPNLRKVDASNNLITNIGTFDNLPKLQSLDVHSNRITSTSVIHDLPSLETFNAQTNLITNIGTMDNLPDLTYVNLSFNRIPSLAPIGDLPNLETLIVSDNNSYLRSLGTMDGVPKLRILDLQNNYLNYTGTEGNLSSLSDLTNLTELNLRNNVYIDDISGLSTLSRLIYLNLDSNKIEDISALSNLTNLQELTLENNKIENISALSDLENLNKLVVSKNKIIDISPVANMVNRGAIVTASNQTYTLPTVLSYQSSFTIDNPVIWYDGTLLAPSSIGNSGNYKDGKITWTNMTATSSSTLFNFNRLKDGLTFSGTVTQPYKSAAKVTADAEQTYTIGDTISEEQFLKDVNAKSSDGAPVTSDFATVVDLNTFGEYEVTLTSEKDGIQGDSCKVIVKVLHGAPVISADQTISYDKHATITEKQFLEDIHASTDLDTAITTNFSTAVNLNKGGDYTVALNSENEDGVKAETVYVTVTVNKDPAPIISAKTEITYDKFSKKTEAAFLDDIDADTNDGSIVTSNFATAVNLDKAGDYTVTLNSINSDGVAGTPTAIIVHVEKEKIATISTNTAQQYEKYAKINETQFLKDVHASINASPTTAVLESDFETVVKLDVPGTYTVTITATNEDGGVSAPKEVSVIVRKIPAPEITADKEITYPKFDEVSEAEFLNDIHATISDKNVAITSNFSTDVNLNKAGDYTVTLNATNEDGVKATPVEVIVHVQQGERPVITADATISYDKFANITEAKFLEDIHATSSDGQSSTVITSNFQTATNFKTAMSYTVTLNAVNEDGISAEPVAVTVTINKEPAAALKADAEVSYAKNEAVTESDFFKDVHLEGTEAPSTAKATSNFDSVVDRSKTGDYTVTINATNEDGAVSTPIEVIVHIEAESAPVITANAEVKYNKHEQTDERRFLYDSEAKIDEANVEIKTDFAEKVDINKVGTYTVTLTATNEDGQAANPVEVSVIVSDAAAEKVNVKYVDENGSEISAAETLTGNLDETFSIDAKSIAGYKCDATLSGVFSTVEQTVVFHYKAIKPGVVTIKYEDTNGKAVDEDKQITGEVGDDFEAEAQTVSGYSCRAIASGKITEEPQTITFTYSTATPSKKSGEITVQYVDESGKKLADSKKVTGNIDDSYSVEAKAIEGYSVVGDDSAKGVFTEKSQTVTFKYKKNTQVSKDDPKVKGKTNQPSSTDTKLKVDNNSLPATGDTENMILAVLIGFNMLIVASIFLFRKPKTNQ

SEQ ID NO: 20 - protein, 539 aa, Listeria monocytogenes
MKKTIKITTSLLLSFACVFSIGDFTKPHTVEAEIVYSLTNPKPVNEIFTDPKLAQVVADWLKLPAATSSVTQTQLNTIKALHFDSKGVQSLEGVEYLKNLTQVFGYGNQVSDLGPLSNLTKLEVIQMPRNQISDLTPIANLTALMSLDFEFNNLQTIEPIKNLTNMLELNVSANPISDINAVKNMTQLEFLTLRDCEVSDLSPVENLSNMLMFWAGRNNISDITPLKNMSKLLGLSLFGNQIKDVSVIKNLTSLEDFDIKANQVSDISSLATSTTLETLTLSFNQIIDISPLKNLTNLTRLELENQTRALDAVEIDNPLILPAPVIDENGSRVQPSKVSHAGVYANGEITWEGLQSNYILNYEYALPVTIGSLTTTYSGKITQPLLEKPVDPVTPVDPVDPVDPVDPVDPVDPVDPVDPVDPVDPVDPVDPVDPVNPVDPVDPVDPVDPVDPVNPVDPVNPVNPDPVNPMKPVEPIIPVTLENQFTLVNQTISVNEEIATQPAKDIVKLPKTGESGMTSSLFGGLILTVTSAILLRKRK

SEQ ID NO: 21 - protein, 399 aa, Listeria monocytogenes
MNKYFKNLATILFTVSVLTTSIIASPAMASAYEESHNVSTIYTSPLDTPHVGDTKITGKTTPLSSFSIAIYTSEGRLTGTFFGTTNTDGTYSVDLSDFTVYHPSGYVTTGKVIYEENSFVRSGTETGGDKVIKVTVSYDYIQTAINELFLNNNPTGTILTITDQNAINAVQEQINTVTSSEKESFQEQLNNAQQQLDARIAQEQAAIQAVNQLFLEDSPVNSIKAETTQDLIDQAQTLVDVLPASELKDTLQANIVKAQTELDERSKPVTPPKNDPEPDNPEEPVTPVDPATPIPDEPSTPTDPATPEKPEITTPENPESTVVEADSSENEPEKSADSKIVNNPIQITSQATKTATKQAKSSATKTTLPLPKAGDTETTSSILFGTLMLSSLVLFKRKK

SEQ ID NO: 22 - protein, 571 aa, Listeria monocytogenes
MKERTTMMSNLKKFGLAFLSVILLVNVIFQTNFVKAATNYGSDFLKTVELLDADGNPQTDFGYYDSIKVHYTWEIPNSTNVKEGDTMEFVLPPELKIVTDLDFSLKDHDGNTVGHVIAKKSTGQVVITFTDFVEKNSNISGYLDFWTNWDKSLVEGNENVPVEFPVNGTTETIDVGVGGKNQIDPDESLYKYGWADAENPELIQWVVRVNYSKQNIQNAVYEDFIGPKQVVDFNSIKAFHGEFDPDDNFTPGAEVPSSAITQTTDGFKVDLGNLTDSVKISYYTTSTDNGASPNYTNKGQLTGDNFIKQEIEVATPTSGGGGGGEGTTGSVELTKTDDSSQKNPLEGAEFKLVNGAGATVQTGLKTNADGKLAISNLKYDTYQLIETKAPQGYVLDASPVKFTIDDTHQSLFVSKENTAIKGSVSLEKVDRDTKSLLADAEFELQDKDGNTLKTNLKTDQKGKLTVADLLPGEYQFVETKAPTGYILDTTPLKFKISTEALNVTVTKENTKKPEIPKVPVPPKKPEKPDKIISEDSKQTALPKTGDSPLVNGWGLLLVAISASGLIALRRK

SEQ ID NO: 23 - protein, 793 aa, Listeria monocytogenes
MSKNGNFLKKVGLAFLSILIVASTIFQTTVVKAATSYGSQFLNTVELLDKDGVPQTDFGYYDNMDVHYTWSIPNSTNVKAGDTMDFTLPSQLALATDLAFDVKDSKGQVVGTATVKKATNQVTLVFSDYVEKHSDVKGELDFWTAFNQKVITGNETVDLVFPLENGTTVIDVEVGEKTPVSPTETLFKYGWVDASNPSLIHWVVRVNYAKVNIPNAVFTDIIGAKQTLNFDSIKAFHGTYSADRVFTAGAPISSTNFSATSDGFSVALGNLTDSVQISYTTTTTDGGKSTQYDNTAKLAGTDFVTKQTSTWTPASGGGGEGGGTTGSVTLTKEDAKTKATLEGAEFKLVDSKGTVLQENITTNASGQLSIADLKFDTYQLIETKAPTGYKLDTTPVEFTIGENNQAITVTKENTLNTGSVELTKLDAATKATLAGATFELQDKEGNTLQTDLKTDENGVLKVTDLVPGSYQFVETSAPTGYKLDNSPVSFEVIAGETDQVVKVTKENTLEVGSVELTKLDSATKATLAGATFELQDKEGNTLQTDLKTDENGVLKVTDLVPGSYQFVETSAPTGYKLDNSPVSFEVVAGETDQVVKVTKENTLEVGSVELTKLDSATKATLAGATFELQDKEGNTLQTGLTTDENGVLKVTDLVPGTYQFVETKAPIGYELDTTPVSFEIVAGETDPIVKVTKENTLVPPTPVPPTPVPPTPVPPTPVPPTPLPPVPYEPTVPPTKPEVPVTPKKTENSEDSPKTTPIRITQSLPKTGDTNSFAGLGVILIALSLSGLLLKRK

SEQ ID NO: 24 - protein, 367 aa, Listeria monocytogenes
LKKILTGLSTTLLLTVLLLTITGGDLKAKAASDLYPLPAPIIDVFPDEGLAKDMAKNLNKDSVNDVIDQDDLDALTGLGFETETITNDSMQLLERAMFNNVNIVSVMEFGEDLTEFPDISTIPHLNTLFFNTPPEGVTRNLSLPDYQNYPEMVTITMSGSNLIGAIPDFTGMPDLSQLYMADMMITSDDVPDFHTIPKLSTLDLSHNQLTNLPDFQNLTNLAELNLSFNNLTNTMTNFTNLSNLNNLNLDYNHLNELPSNVLNSIFIENQSGTVPDQIIKQGETCTIQLPIYFQLAEINMLVNPTVLGSYSADIPVEVVTTTNADTESITLDTSELSPGVYNFNVQFNDAYPITQEGCVYDWVLTVN

SEQ ID NO: 25 - protein, 626 aa, Listeria monocytogenes
VKKKFVYLLLLVLFMTVLPFQMLEAQAASTSWIEQELDGNEPFIAETEKILSKNRQDITLADLETIQKIHVFGADSIPNKISDYKNLTALEANYGTITEVPESVGSLKELVTLNVDENNLQEFPMVIFQLPKLEVLYISRGNITEIPTEITTLASHLKVLDVSNQKLVTIPDSILTTNWKAMHDGKLGMSLAGNQIASDIPANYLDNFNSGGNMLEFYDNPTIDYLQKQDQLTYTGGTIEVPLNTDFKQLTPDKTNLGLKSNIPLFSQHEFMYYDDGTSANILTNGVATDVGDGYITIKSTLSTNSNPFAKVRVPIKVTAPLKGADVTVQYLDSNGDTLATPDILSGNEGDAYASTPKTIDGYTLTQTPTNAQGTFTEEPQTVIYVYTKNSVAAAPVTVKYLNEEGKILTASDNLTGNVDDPYQTKAKEFAGYTLDESKLPTNASGVFKTNAQTVTYVYKTIPASIKAHDSTMNVGDTWSAKDNFDSAVDSLGVAVPFDEVKVDGSVDTTKAGVYPVTYSFAGDSVTIKVTVKATVVPAPPITPIKPVVPAPANPNTPSTQQTPTKQSGTLKIKATHQEQPIVAGNLKLPTTGDNLWDSVLYSIFGFITVCLSFVLFFRLKKQKNS

SEQ ID NO: 26 - protein, 862 aa, Listeria monocytogenes
MTTYIMVLVTICGTFFTSSTSVHASDLVLNEPTAYSYTGVSPHLGYAITHNPIYVMKMDGKKVFCVESGIFTTTGGGYIPESYISPKKDILSKIAYYGYTNTGQSHYDYVVTQVMIWEELGDQYVSSTIPNYQQRKAEIMAMVNRHDTLPSWHNQEVKVTVGESITLADSHGVLSGMSLESNNTNATLQQDGNNITITPNANSNDGSITYRKVPQNEVGTSIVYTKPQHQTLVEFHLESAKQATVKVDVIKLGNVQITKVDEETGRPLPDTTMKFEYNGTSTELVTDSNGIALIKDIPEGTKITITEVKAPNGYVNKGVSQVVTIEPNKTIELTFDNKEQLGIATLTKAGEEAKEIEVTESEYGDVHTFKYNANVVAGVTYRIEATQDIHSVDGTLKAKKGDTVATVTTDEKGQWHSPNLYLGEYQAVEVSAPAGYILDTRPIPFSLTYAGQEVELASTAIKATNEFQTLDLRLFKDEESILSWNNNQPEIEVIQGQEKVFGVFTREAQALTDEVHVPANALLGYQTVSDGVASFELKLPQGKYYLKELEAGTSHVLNDTEYDFKFTAENNNATYPIYIYQDTVAVGNETMLKIARTPIINKLHFNEFIIKKLNEQAIFDKESGVEFNYDGLGTGAIFTLENEDNEVIQEVTIDKDGQGNFKNIPVGTFYLKEKSASSTHYLMSEKVIRIESTKDGIKAFDEDDKLLGETSSTDEEPTILLEIENDLKKGTAELTKKDVSTGELLPNTGIRILDEEKNTIAEGRTDDKGIYTFEKLPAGKYYFQEYDAPTGYQLDDTPMLFEITENGEVVKCEMTNNKIPEKITSLPQTGDTTNITIFALGMLLSVSTLGVLYFRRKKAKIE

SEQ ID NO: 27 - protein, 784 aa, Listeria monocytogenes
VKVNKFFKKTTHVLLVAGLTIGLTAPFTGTTAQAAADTVPIQILGINDFHGALETASKDASGSPIGGADYLATNLDNATNSFLQANPGATTDNAIRVQAGDMVGASPAVSGLLQDEPTMKVLQKMNFEVGTLGNHEFDEGLPEYKRILDGVSTNKFGPIVEAYPRVKSDMKIVAANVVNKGTNTVAEGFLPYYVKEIDGVKVGFIGIVTTEIPNLVLANHIKDYDFLDEAETIVKYSAELRGQGVNAIVVLSHVPALSTGNPNTGTKQDVAGEAANMMTKANELDPNNSVDLVLAGHNHQYTNGLVGKTRIVQSYNNGKAFSDVTGELDKTTGDFVSPPDAKITYNTRSVTPNADITAVTEDAKSRIEGVINETIGLANKDVISRDTNPDNKAIDDKESELGNMITDAQRYMANKAGADVDFAMTNNGGIRSDLTTRLANGQNEITWGAAQAVQPFGNILQVVEMTGADILEALNQQYLSNQTYFLQISGLKYTFTDTDDLDHAYKVASVTTEDGTPLKTDQKYKVVINDFLFGGGDGFSAFKKANLVTAIDPDTETFINYIKDQKAAGKVITAQKEGRKVYKSQAEIDKETKDAAIKAIKEATKINKLAEKDKTLTGTTLPGATVSVQKATANARMALAAGPNATADANGKFSVDVTSLNLKKGDQITTTITDPNGYSTTFQATVQAAATTPPDNGNGGTDNGNGNGNNGGTDGNGGTNNGNGSGTNGGTTTTEDPTTTTSNTSTTGTSSNTSLPTTGDTAGLATVFGVILTTTALYVLRKRS

SEQ ID NO: 28 - protein, 1349 aa, Listeria monocytogenes
VILKKIFIALIALVVIINTVSFTSVSASTPTWLEQTMNNNEPFIKEIETETGKTRANITQTDLEAITALRVTGASDIPANIDMLTHLTLLKAVQGTISSVPNSVGNLKELKILNLNTNHLSNFPTIVYQLPKLEELQLNDGTIEEIPATITNMASHLKFLTVNNNRLVKVPTIIFSTNWSNSSTGELDLFTTGNQIVTDIPANYVSNFNNGQNMLEFYDGQFQKQDQLTTTPGYTIDVPVGTDFNQLTPDKTKLALTSGRTLLAQHEFEYYDDGSSSLIHNGVAAAPGQATIFIKSKFSTQSNKFARTQVTVNIAALNGGPITVKHEDTKGQELAPPVILNGKDGDPYTTTQKTFPGYTLVATPANQNGAFTLNPATVNYVYSANDYKLTSTFKDAQGQELKAPVVDTKDYHIQDNYTTTAATIPGYSLVSTPANQNGTFGAGNVTVNYVYKKDDYTLTSTYKDTNGQELKAPVVDATTYHYQDTYTTTAAVFPGYTLVATPTNATGTFGSSNITVHYVYQANGYQLTSTFKDQQGKTISPDDVDTKTYHVNDPYTTTAKTIPGYTLVTTPTNNQGNFGTSDITVDYVYKAEDYTLTSTYKDAQGKELKQPVVDSKKYHIQDNYSTSAATIPGYTLVATPANETGTFHTSDVTVNYVYKLTDLKLTSTYKDAQGTELKPPVVDSKTYHIQDNYATTAAVIPGYTLVATPANQSGTFGSTDIQVNYVYQAVAYKLTSTYKDQQGNDLALPKVDTKTYHIQDGYTTSDIAIPGYTLVAAPTNQTGTFGASDVTVNYVYKANDYTLTSTYKDAQGKELKTPVIDSQKYHINDTYTTTGATIPGYTLVAAPANQSGTFGAANVTVNYVYKADDYTLTSTYKDANGKELKAPVVDSKTYHTKDNYSTSAATIPGYTLVAAPANQTGTFNTSNVTVNYFYKANEYTLTSTFKNVQGTELKPAIVKKGFIIKDGYSTSGVTIPGYTLVATPSNKKGTFGASNVTVNYVYKANGYALITTYKDTQGKDLKPLAIDTKTYNINDPYTATALNIPGYTLTTTPANEKGVFGASDETVNYVYKANDYTLTTTYKDANGKELQAPKVDAKTYHIQDTYKTTAAVIPGYTLVAIPKNDQGTFGANNVTVNYVYQTNDYTLTATFKDAQGNELKATEVDAQKYHIHDTYTSKAAVIPGYTLEKTPTNETGTFNASDIQVNYVYKANDYQLTSTFKDQQGNEIALPTVDAKTYHIHEAYTTKARLIPGYSLVAAPKNQIGAFGTSDVTVNYVYKKDAIIKPITPAKPTILTIKTPASKVIKTKVVKQTLPKTGDDDAGLLNLLRLIGLVLILGVFLAVGSKKLR

SEQ ID NO: 29 - protein, 903 aa, Listeria monocytogenes
MKKQRVDYKRRLDQKRAQKAKLIAALITTTTMMVAPVTVNYDSFNHQFALSGIQADAATIDLLGNSNLNTQYSNGKLVITLSGNQLVSASAVSTYYPYFELPSELSSILSNPNIRANMKIDYKIAYLGIGGIGLFNQGTVNGSSSSNFFIDSSRNAIGAKVNHLLGVGVGSVSTFTLTIDLLALGVTALPSANDGKLDFAARTGDGLLDVDLLNSNAARGFITTDVGDADADADADADADADADADADADADADADADADADADADADADADADADADADADADADADADADADADADADADADADADADADADADADADADADADADADADADADADADADADADADADADADADADADADADADADADADADADADADADADADADADADADADADADADADADADADADADADADADADADADADADADADADADADADADADADADADADADADADADADADADADADADADADADADADADADADADADADADADADADADADADADADADADADADADADADADADADADADADADADADADADADADADADADADADADADADADADADADADADADADADADADADADADADADADADADADADADADADADADADADADADADADADADADADADADADADADADADADADADADADADADADADADADADVDIDWRDFLVEKPTVNPIYEGTKTISGSSIYKNMNINALLKSLQSDAPVGTTFYINLTLPDGTVIGNVLIHADGTYTINIPNYNLKAGDVIHLQVTAKYGDEVKTSDDVSVTVLPLVDSDADADADADADADADADADADGGPNPSTNGGTTGTSNGGTGVTVTNMSSNGSGTMLSSGYSADGTTSISASDLPSTGDTNSSLPWVGLGLFSLAGAFLLRLFRK

SEQ ID NO: 30 - protein, 1711 aa, Listeria monocytogenes
MKSKFFIGMMTFLLSLICLTGMKAEAKSVGDISPDDISPEISDNRFQSAEGKVLPNFEVDMSISDQNNGKLSIDEDFELTSDGDIILIGTVQGQYIQGTPILNENGQLNKIPNRDQGIIMRVDRTTKKVEWARVVNYEDGNYNSQYAADKWFSSYKSITTNSSKSTFYVGGEVVNYYGDSGGGSTLIVKSIDANGNFQIAHKSYVSYGVPSRSDLTYAYFMDIQMEGNTLTMSASARYAAQGKQFIRYTLEPASLSITKNEFNPLDNTFWAKYQRTDVLKVDNKGLMAYNADVNGANQLKMSIRESENNYKEITLFDSVPEILANSSPYIFMEDRGDGNVFVVMSTPTTWYIALVNIASEQVVETKKMTMNSSTTLNSVIYSEGKGLLLGGSTHAEESIFGSEPLNKNNGYYLALGNDLNVTDSQILRTNQHNSLTTIINGVGNKVDGFFSYDGLNNDGYIQNVEYPNTYDVNPNGAMIFAEFNLQPAPVLDTGNPILAFYQGERRADFDELEGVKAYSGIDSSDVTKSITKNTFDLYTVGVQQQLYQIEYLPGSGNKTTGTRNVQLIHPLETPKLEKSYADSHGAFKVGEVVPANAIHAFNGLDSANNVTYVVTAVDDEKITVDASIKRTEGTKTAVINKEITLMTSTADETAVIDVTSVALAAGKYTSLTDVRNEGHFHIYAETMDSVSIDPKYVKLTEDPENPVDWNAPGVYYVTASLDPASGYTAKDVKVSVAVVDVGSPKVISVNMKPYNPTTALVVAEDDINGAGVYKINWAIKDANGLIIQQGVEESGATIRVQTPVPIDLSTLNDGNYTLSVSAADRIGHTSEASEKAFTVDRQAPVVTADDKITYEINTKKTEEEFLNDVNVKTEAGAVIKTNFDTMVRMDSPGDYTVLVEATDAAGNQSDPIYVIVTVEDTVAPIISADEAISYNQGNIRTEALFLTDIHATTDEPATITSDFADQVKFDTPGVYAVTLKANDISGNQAIPRTVNVTIKDVTAPVITADEAIIYEKGITKSATDFLTDIHATTNDGSAITSNFATVVDLNTPGDYDVTLSSTDTGGNISDPVTITVTVRDTTPPVITADTTITYEKGTTKTAAAFLTDVNATTNDGSAVTSNFNPISLKQVGTYQVTLSSVDENGNYALPVKVTVVVQDTQKPVISSSATSITYERGEKKQETGFFLDLAIKTDDGTPVTSDFDTAVNLDTAGTYTVTLNSEDESGNKADPVTITVTVADTEKPIITADTTITYAKGTTKTVAQFLTDIHATTNDGSTIISNFDPTVLAQEGTYTVVLNAKDESNNEADPVTVTITVVDTKGPIINALNAITYERTINKNEADFLADIEATTDDGSTITTDFNSKDLDTVGTYIVTLNAEDASGNKATPVKVTIKVEDTIPPIITADQSITYERGITKTEQAFYTDIKAATSDNSPISSDFSKIDLTKTGNYEVLLRATDQSGNKALPLKINVLVQDTIAPVIKTTSREITAERGTPMTEQQLLAKIGANTDDGSKITTDYNPAIVNTSGDYLVHLYAVDAAGNQAIPVEITIHVKDTTAPIIKADKKISYPVGTVKTVTEFLQDIHATTDDGSKITTDFDPNMLKTPGKYTIHLNAVDADGNKAKTIDVSLTVEEKVTPPKPPTPDDGGNNTNGSNGTNGSNTDITVNPTKQNTTATNESIPALGDTKSTIPVIVGMFLLATSLVLIRRK

SEQ ID NO: 31 - protein, 646 aa, Listeria monocytogenes
MKKLCTVILFLTLLLNGFVPNAHAKTESPSADNNLQVAPPAAIKDLFPDPAMANEVLKSLNLKKLNKKSTSDTVTQTELNSLTGSFQAINKGIKSIEGVEYLQNITELDVEKNQITDIAPVANLKKLTTLLINTNQITDISPVADLANLTTFYCGNNPISDISAVQNLTKLSIFNCYTANVEDISPVKNLVNLKTLSLGSNNIHDISDIEKLTALEYLSFSNNPVENPEVIGNLTNLNTLWLYNAQIRNIDFTANLPKLKSVYLYNNQISNISEVSNWANIEYLELNNNQITDITPVANLTTLKTLKLNDQIITNREIPFQKNISIENKVMDNFGNIVTPNNISDNGTYNSPTLSWNLNETKDNLSYDFTTKITILNINATYSGTVIQPLTKDSTRPIITADGKVSYPEGTTKTTTEFLTDIHATTDDGSPIEVDLNALDFGTAGSYTVTLTAVDTAGNEATPVDVTIIITSVDTSKPVITADEKVSYPEGTTKTAAEFLTDIHATTDDGSPIEVDLNAVDFGTAGSYTVTLNAVDTAGNEATPIQVTIIITNSKKIDPIIPVEPGGNDVKPEKPNEIIILPKDSEIPLSIIPKDNIEKTNSINVIKMIETNEIKNKMLPKTGDKLPLTVFLGMLITLAGISYLRK

SEQ ID NO: 32 - protein, 572 aa, Listeria monocytogenes
MIKKVFHFILVLMLSVSIIPLFHAKAAETTNGVDSSEQEDNTEVAREEMPPESEEPVFSLEQNRDDAMAALVVPQTRNSFLRAASTPTFQQTFINSISTQAMDLCKKYNLYPSVMIAQAALESNWGRSELGKAPNYNLFGIKGSYNGKSVTMKTWEYSDSKGWYQINANFAKYPSHKESLEDNAKKLRNGPSWDSSYYKGAWRENAKTYKDATAWLQGRYATDNTYASKLNTLISSYNLTQYDTLYDTIKQQKNVSEDAKVVKADGHGVYSGIYNTSAASAKKLSTGAPYNNKDVKILKEGTTSRGTWVQFSLNNKVIGWMDKRAFVYYPKATNVKTLNLTGKITAGSTNGLWSEVPGTVNAKKLATTAGAYQNKDAKIIKQGQISGRTYYQFQVGGKTIGWLDARAFHVYDKIQSQSNVNWNRTILNADKHGVYSGVYNTSSSSMNKLSTGAKYNNKKVKVIKQAKTARGTWYQFQVNGKTVGWMDYRAFFDTITSQKTMNKTVTVGNATNHGVFDGVYRTSPTVKRISLGKPYNNKKVKVLKEAVTDHATWVQFKYGNTTAWMDKKAFKY

SEQ ID NO: 33 - protein, 562 aa, Listeria monocytogenes
MQRKLIGSFFILMVLLIIGSTSEKVQASPTSSNGWQLKWAIKNNDFEDVDITDYGQNAGTTNVWMVNQAGVDAWGTTNPTGNIEVWQNGNGYNVPAFSGNNFIELNSDGIGPVYQDIRTIPGSNLTWKFSHRGRTGVDTADLLIGSPESQTEVSRVSNGETWGSFEGNYTVPAGQTITRLTFNPISTANGSLTSGNFLDDVQLYINVNGAKIGDVVWYDFNGDGIQQDSEEPAPGVKVDLLTKDGTFKESATTNNIGSYLFTDVLPGDYQVKFSLPNNDFIFSKANQGNDKSLNSKPDKTGIASVNVPNLKSENFDIDAGITTNGKVEIQKLSGDKALSGAVYAIKDNSQSEVAKITTNQNGTGTAEGLPPGNYTATEVTAPLGYQKNTTPKKFTITYGDTNPVKLTFQNAEKTGSITIFKQDEANKKGLANAVFDVKSIDGTTLKKVTTNSKGYALAENLQPGTYVITEVTAPPGYEKSANEIRVTIPFNPQKTINITFSDNKIMVPLKPTPTKGSTVVKVSGETTKITALPQTGDSSSSSTIFTGLLIVVASGLFVYRRY

SEQ ID NO: 34 - protein, 1530 aa, Listeria monocytogenes
MITVKKYPMLLMSFLIVGMIIFCVPHHAQATELDNIIDGVQILDRDGKPIDSESDSDRVVDSQEDIVVVYNWSIKDNQPVHAGDTVHIQIPKEFKIYTTVQGELVISDGGASCGEFEITTDGMMTITFNDYVENHSISHGIVEVYTNFDLEELDGETPTTIVFPISENDSEEFTIKIKPDTTNAFEKKGSTVQNAQVIDWEIKINQELATHENASVEDFPGNGQKILFDSFEVHEMNMHIDGTYEIGAKVDPSEYTVTKINNTSGQTGFRLTFENPIDSAYQITYQTEITDFNKATFSNTATFNSDETEEVMDSDVVIPRDPIIQKYPLLFDTTSNKISWKVEYNQGHYALDNSVMVDTYIDEQSFGGITRIVNGDTGIPLLPTEYTVTDMGSAGFKIELPDDGYYTIYFETIVPEGTTGMISNTASIISPNIPDNEAEGDYFIPDPSPTEGLIDKKIENFNAKTGELTWEIIINKDGGTLHNPVITDEFPDGGLIFHPATLKIMDSEQVKLDSADYEVVPLNGDSSWEKGFQINFNRDITGQHVITYKTQVNPSTHTSGDNEYTNNATIKTDTAEASDSDTKWIDKVIDADGYKNGVFNYKTGEIEWKLIFNDSSKLISKPTIEDSLNSGQTFIQDSIEIHKIDLSATPQVGELIPPENYDVTFTKKENGNEQMLITFKKPLIHPVEVTYKTKPVGITKPLYKNKAVISDGEEVLADYEAEVIDDNANKYVNKSGEQVGDNIDWEIYANQSGSTVSNATVTDTLGTGQKLDTSSIKVYKSQTSVTGKMLQESNMPISPGEYDLKTGVDEESNLEYFQVKFKNEINQSYVIKYQTAITLTSDTETTAQIGNSVTFTGDNITKGETEKTKNIEVKITTGDGTGTGETGKIILNKVDKADPSIPLEGATFDLYANDEKVDTQTTDKNGVIEFDDLVYGDYTLKEVSAPEGYTLPTASTENIQVKLEQDEKVVQVMNEKMPIKETGEVHLVKTDKATGATLAGAEFSLYDKSGAELQNGLTTDENGELTIHNLDLGSYYLKETKAPEGYKLSEKTWEFSVESGQVDAIEIQAENEKDLGEAVLTKVDSETNAKLSGAKFNLLNDSGEVIQTNLVSDENGEIRVQNLEPGDYAFQETEAPTNYDLATNTWPFTIVAGQTSATMVTAENNKTGKPDVDTGEVILVKQDSATGETLEGAVFDLMTADGAIVASNLTTDANGEITVTNLAPGKYSFKETKAPEGYELATDVWEFTIAPNQPEKITITAENTKLAPIPDAGSVKIIKQDSENGVRLAGAEFSLIAENGETLQTNLKTDEAGELEVNNLAPGNYRIQETKAPDGYQLESTPWQFEIVANDTSQVTVIAENAKLEPDVAETGAVRLIKTDSETGTRLSGAVFSLLDESGKVIQANLTTDENGEIFIDGLTPGNYSLKETKAPDGYELAEQPWNFQIVKGQVDAVIIKAENSPIIANGAISFEGDETDKPESIEIPVRKTDTLATEVTKLPQTGDKTSFPRVILGGSAVLMSLLYLRKKSS

SEQ ID NO: 35 - protein, 633 aa, Listeria monocytogenes
MKLSKILTIIVLSATVTSSLPIPMVKAESTTANEMKTENQLLKTDLKETPKEKTPNNNLKNQLVQAGTKTYNDYFPDDNLAKEVAETMNKNADESVTVEELAKVTKLDARSQGIEDSTGIKYLTGLEVLNLEDNQLKSIDVSKNLNLKELTCSNNPLANLDVSKNLALEELTCENNELTQLDVSQNTALEYLYCPRNQLTKLDVSKNSALRYLACDVNQLTNLDVSKNPALTNLGCTKNQLTDLDVSQNPNLGTLVCSDNQLTNLDVSQNQALENLACDNNELKNIDINQALSLKELSCENNQLTNLDTTQNLALEILYCDDNQLTDLDVRKNVNLLILFCNNNQLTNLAVGETIAKVRCNNNQLKDVSSLPDYFTDDNDDYQAMDQTLVSPTQTTQNNTLVYAVPTDLLDKDGNIVSIIKPDNGGIYDAATRTITWENLPDNGEVSYTFENEDYGRFSGRVTVPYTGKETISISSDDEISYKEGTTKTEAAFLADIHASVTPATETITSNFADVVDFQTPGKYVVTLSVAGSDVTKDVIVYVTAEPSEDNPVAPTPPKDKDDTDVNNEQSPGNDKDGTDVNSGKSTDKQPVKVVEKQLPKTGDITSLSLSLAGIVCLSFGILFFIKRKKKTV

SEQ ID NO: 36 - protein, 388 aa, Listeria monocytogenes
LRKVLMFLSTALLLAILSLSFTGLDLKAKAASDLYPLPAPIIDVFPDDGLAKDMAKNLNKDSVNDVIDQDDLDALTGLGFETSTITNDSMQLLERAMFNNVTDVSIMEFGAKLTEFPDITTIPHLKTLFFADPPGRLTRNLSLPNYQNYPEMDTITMSGNNLIGSIPDFTGMPALKQLYMSEMLITSDELPNFNNIPLLITLDLSSNQLTTIPDFQNIPNLTFLDLNANLLTNTPDFQNLPKLTDLNLRHNNLTGTMVNYTNLPSLESLNLDYNFLTELPSNVLDTIYVQSQNGELPDQTINQGDTCTIDLPIYFQMEETNMLVSPEVTGEYIGISVIQLPTTVNEEGNTITVDTSALSPGEYKLDVSYNHNYATGGVCSYDWNVTIN

SEQ ID NO: 37 - protein, 1152 aa, Listeria monocytogenes
VNHLKKLVSILICTLLIVSLLPFSVWADSQERDGTDVEEITTKEKVTQETTSNETTSEPLKGTTVNKAINAKSFPTGNYSGDFSINSQKDVIESGQTVNYNIYLKITGPNTRYQNAKLVINLPKNGEFNQSLNELKIAGATPSYNKTTRQLVYTYQTLNSGVVDKVILKMTTKNGYTPNGTKLVVTGELSADNLSEKVTEQAETTVNATATTALSNDFTKVENSINNNPSQGDIGIWSFNLNIPKKSTGSLFMEEGKKIVIEYTLADKLDYLGVAGDTPEPTKVEGQKLTWEIAAPTYLEQEKANSLLNKTFQIRTFFQPTIPNFATVENKAVATTNFVTLTDSIVDTSKASVSVSASDPATIPPTIGSVYAPAHRGPVDANWGIATVTGNPDIKVYDTAKLGFSLMLNSAMNDSPWYDFLYYDAYYNIDDNLNLDYFRSGDFYFKPNVNYPGWAQLKKSPKYNLLVKYDGDTDWTTLKEDVELSKMYSRKDLGIPDDKHVSKVWLHFTYAPAGMYAADLSFFTTVKEGYVGEVRNSTQINMYGADSQDYIHYYDDTNPWPEAWKNYAGDRTAQIIPQPTGKNKFVQGSVVFDDTDGNLINIGDNSISVNLESNKASISRLKGPFEAMVLLPSGVKMKNTEQNGFKVTVLNENYQNAGRQLLKVKWDKKTLLPAEKLTAKINVSVAKDTPSNMTVEMFGFLQDTDFNVPEVSGTPTISDTKMEIDSNDINQNGNSEESRITSGNHYILNTSNHLKISKKAKGNRDKEYSGLANATTNSIVSYQLSLENDSDEKIANMVLMDVLPSENDLGITDNSERGSKFNLALTKAVEVPKEWKDKVEVTYSTAKNPKRAGILDKHTIYPIGTEPLVDNTEATQADWLTASEVKDWSNIYSFKIELKEGIEWIPGKSMKIQFDLKTPKKNQIDKTLLKQQTKKEDRAAWNSFAVAVNNSQVIEPAQVGVALDDSVAPVTVQYVDQNHKQIASPETLTGAYGEKFTAKQKKINNYSLVKIPANVSGTFNEKAQTITFIYQKVTAGRIIVNYVDKNGEKIADSIVLNGKLNSSYTTSSKKISGYKLYQTPKNATGKFLNTSQTVTYVYERTSNLSISSSNKGTENVKKLAKLPHTGDSTTTNLWVIIGLFMLSGAFVIMKKR

SEQ ID NO: 38 - protein, 1612 aa, Listeria monocytogenes
VKNIRHWKKLVIAMVIGLLVFQNVSPVLATMTDDETANTTLKIIKEDKDTKEKINGSTFEIKNKETSETSDLTISANGEATMDSLLPGDYLVKEKVAAKGYALDEKEYSVTLTEKEEVITSVSAKVQEETTKEAATPVKKATQNANLKAAITDNIFNKVTLKDGNGDEINTSDRIQNGSGVVLNMNFAFSGKNYKAGDTFTTVLPDAFNFGNKNLSGNFLPSTEAEWSLDVTTRELTITFLKDGIQEGDYDVNISTAFKVFTSTEETIQEVVFKTAGKDTIYQIEVVPVVNYPTTVAITANPGVVNPTKGQVDAKFNLTKEKDAKGELKLTDYTSGGTTTIDKDSIKVYSSDVSAGGTFIGTKKLLVEGTDYTLTYSATSLTVTLNGGLAGKGYQVTYDRTINKPSDSLSYMSTQAYTVGDAGTLSSNSAYVYLTMTNYKHLEKKATYNGSTQSIDWKINFNFDQDEISPSTVLTDVLADNDVEYVADSLKIKRVTFNATNGSPIVGSDASSDWTTSAISANGNFNLTYKNTNTNAYEITYSTKITDFSDRKIKNEITDENGVSADATIAIQPDLLKKEAGTIDYFNNTMTWKITANSDRIKMGNLNITDEFSTGVKALKSYTVRAYTDNTNSVLLTEGKDYTIDKDVTPAGFYIQLIGDYASTDKKIVVDFVTDIDLSDVTKTIDNKASISYYDGGIIKYVDEVTASMTPDPGMMTNGGKYGSYNSTTGNIDWIVSVNAMAKNYDNLIFDDAIPTGLTYVEGSLQYRNVASTSEMMNLYIPLNSVGTVAKTGDKNYPTKVDTTGNKLHLEFANLENSRVFIKYSTKPNENWYFYSYVQNTAKVSDNGVGEKSYSYQAYASKLFNAMTKTATIDPSFDNKVNWIVTLNNISADRPINNPTITDTMKTGTTGAQVVKSSFKVMNETTGEDIDSKYYDITYTDNNFTIQFKDYKATAPIKVTYSTISLMSGLVSNTATTASPDYGSLPMTYKSRTTSISPAFTIGSGSGTATIGSLEITKVDKKDNSKKLTGAKFQLYTLEGDKAGQEATTDSDGKIVMDGLQSGKYKLVETEAPTGYTISDEYKDGKEITVTADIATSVTIENTEQTGSVVLLKEDSATKDAIAGAEFELQNADGTKVADNLVSNADGKIEVTDLAPGDYQFVETKAPTGYVLDGAPTKFTVEFNQEAAVIVTKENTAKTGSVVLTKEDSVSKATLSGAEFELQNATGTKVKDNLTTNADGKLEVTDLAPGDYKFVETKAPTGYELDATPVTFTIEFNQATAVNVTKENVAKTGSVVLTKLDSKSRSNLAGAEFELQTKLGVSLKDKVVTEANGQLQIDNLAPGDYQLVETKAPTGYDLDATPVEFTIEFNQKAPIQVTKTNTMSTGSVVLTKTDGETKALLANATFKLVDEDNNVTENLTTDASGKLEITNLAPGDYQLIETKAPAGYELDTVPVDVKITFDQKETLQVTKTNLKTVVSGKVIAEFVDTKGNVLAEKEIHTGIVGDKYATKAKDIKGYKLTKQPTNKEGVFKETEQKVTFVYEKNKAPIVVNPDKPVTPVKPTKPVDPAKKPTVKTSLPSTGDESPYGIIFTGLFASFMGLFLLRKSKKIND

SEQ ID NO: 39 - protein, 940 aa, Listeria monocytogenes
MYKLVKIILALFLITTVFLPFSNVKAAPTDVVNIPDPVLNSGLKNIIGNPFLDEITEANMATITVADLSNMSGAPGYPVTGLIKDLTGLDKAVNMTKLYFSNQSQIKNLDKIKNLPNLKKIVAVTTGLNNISALGEMPALEEVELGGDYITDFTPLLEKENLTSFSYNSYAWSNPAYHQINNDEFKNFTKLKSLVKLDLTWNNITDLSPLTENDHITNLNLNYNQFTNVAPIATMKNLKVLYLNNNNLTSIDALNTLRGLTIAYADNNNITDLSNLKNFFEAMVAQGDYEGLQINNQTITLPTINIKKGATANSTNPTLDINGQKMPVSNISNDGTVSADNKTVSFANLPIGNKTVTYKAKFTATSSKGVPLSYSINVSQPINVSEQTDSTVSVFYQDENGNELAPTETLSGKSGEDYQTTEKTIANYQLKEIEGQASGQFTDTDSTVTYVYEKADGAPVTVKYVDADGNDLATSDTLNGKIDAPYQTSAKSLSGWTVKTTPNNATGVFTNSKQTVTYVYEKADGAPVTVKYVDGDGNELATSDTLNGKIDAPYQTTAKSLSGWTVKTTPNNATGVFTNSKQTVTYVYEKADGAPVTVKYVDADGNELATSDTLNGKIDAPYQTTAKSLSGWTVKTTPNNATGVFTNSKQTVTYVYEKADGAPVTVKYVDADGNELATSDTLNGKIDAPYQTTAESLSGWTVKTTPNNATGVFTNSKQTVTYVYEKADGAPVTVKYVDGDGNELATSDTLNGKIDAPYQTTAKSLSGWTVKTTPNNATGVFTNSKQTVTYVYEKADGAPVTVKYVDADGNELATPDTLNGKLDTSYAVTAKNLSGWKLTATPSNANGVFTTDAQTVTFVYAKQEDDPKKDDKTPNNTKPDTNKTPIKINENKPTASKVTTIKRQTKLPKTGDTQQDSILFGLVGTCFVLLGIYSISKKNS

SEQ ID NO: 40 - protein, 415 aa, Listeria monocytogenes
MFNKKKTIASLIVLSSLASQIALTPISALADTHDTNNIALLQNTNENVPYKYTSTLTFPTLTNQTQEDYKLEIKLALPSGMNYTDLQVSVGGEDITNQVGTTSFDNSTNTVTFKFDKVTSWDSLSKAKVKFDWKTSYSGEGGEAKIDSLVATATATSEDKAGNKSTSTGSLKPKDISAPVVKAEETEITYSPGSDVTEEQFLTDIHASVTDNYDSTISLTSNFTSAVNLAVSGDYSVNVQATDKAGNVSNTLNVTVHVSTPAPVAGANITVNHLDSNGNKIAESDTLTGVVNSNYQSESKKITGYTLETTPTNATGTFTDTPQTVDYIYKKDTVTPTPITVNPVEPVKPVNPVVNKPVTVKPANDNTNPSTSNSVEKTTYSSLPTTGDTDQSKSSTIFGALLLLISAPLLLFKKK

SEQ ID NO: 41 - protein, 832 aa, Listeria monocytogenes
MRKIPVVVSLALCFSLVSPSLYASADTITAVQITKEATTDTTEPTTIDQPSRMDNSQTAPQKMTASSSEEAATTNSTEEENTPKNNLKSTSENSKTYAELFPDVNLAKIIAKNISGTEDINAEVSEAELQTITNLVATNQNITSLTGIEHLTALENINVNNNELTTIDSLFNIPTLKSISANNNKITGNFSLVKTLPELHTLEVLGNAITELDIENQPNLVTLSADELELKKLTLKNLSQLNGLGRIASSISIDWGDLESVTLMNLPEIISVDISGNYLDSDDIHLENLPAVKNLDISSNELTRLPKINDFPLLTTINVRSNKIDRLESSKLVDVPKLATLNADKQAVTLSKTIAAGNFTIPNNVENLAGQMVTPKIISNNGTYSDQSIAWASGELSGLSKVSYTFDEVINSPAIAGKYTGTVNQPIEVKAVPVIVADKSVSYAPVNAKDEATFLQDIRASASENAQITSDYSEVVDFATPGDYTVTLHAKNEFDLKADPVTVVVHINDIQKPQVAVNSNDISFEVGTELTSEVLLAKSGAVVTDLYDEAIKMEVDLSEVDSSKLGTYEATIIAKSKSGASSDPIKLSVKIVDTEKPIIQINNPEIIIEKGSELTEGQIIDQVGITATDNYDQDLNIHMDLSKVDTSKPGSYEVTIYTEDSSGNRSETVTITVKVPEARIGKITIQYMDSENNELAESNTITGEVGETYETLAKEIEGYTLKENPANSSGVFEETRQTIQYIYVKDIINPEFPVYSENNVTPELPSNNNNSVNGSRQTPSKSVKKQSKAYSKINQMPMNLPETGDSTNLLFIFMGVLLLAGLTLSKAKRKNQ

SEQ ID NO: 42 - protein, 511 aa, Listeria monocytogenes
MVKQIMIQGTASDAGKSVLVAGLCRLFKNKGKRVVPFKSQNMSLNSFITATGDEMGRAQVFQAEAAGVFPDVRMNPVLLKPTNDRQSQVIFMGAILDNMDAVTYHDFKQTLIPKIQAVYQSLADENDIIVLEGAGSPAEINLNDRDIVNMGMAKMVDAPVVLVADIDKGGVFASIYGTIMLLNEEERARIKGVIINKFRGDVALLQPGIDMIEELTNVPVIGVIPYANLQLEEEDSVSLNGKNYAPDSNALLDIAIICLPRISNFTDFHSLEIQPEISLRYIRNLADFGKPDLVIIPGSKNTLEDMAFLEESGLKKAIQNFAENAGKVIGICGGYQMLGQKMLDPDQVESKQLEIAGLGLLDTETIFLDQKRTTQITGVTHSGEAVEGYEIHMGETKRGESTSPFCKIKAVNGNEETHQDGAISANKNIIGTYIHGIFDNDVFLGNLFDELLTRKNQSIYPHEIINLKEHKEQEYDKLAALLEANIQMDQLEKIMKGEKICVSTQKPAIKE

SEQ ID NO: 43 - protein, 268 aa, Listeria monocytogenes
LLKTEHISFQYEDGKQALTDVSIDLEKGNIIGLIGANGSGKSTLFMQLLGINKPSDGTVYFEGKPLAYTKKALFALRKKVSIVFQDPDQQIFYSNVRDDVAFALRNLGVSESEVEARVTKVLDIVGAKDFQHKPVQYLSYGQKKRVAIAGALVLDTDWLLLDEPTAGLDPIGKKIMMEIIERLASQGKKILISSHDIDLIYEICDYVYMLKDGSVLTDGETSSVFLEKSNIELAGLVQPWLIKLHQQAGYPLFKKEADFFAHTGKVTN

SEQ ID NO: 44 - protein, 225 aa, Listeria monocytogenes
MLTIDKYAYQNRWIAFSPSAKALFYVAILILALTGPVLVQAILFLCMVPLTLYVVKIHFKQYLKWLLLPFSFLLFSLLSILISISKDPSSFLASISIGSFYLGISDVTITTATQVFFRSIACLAATYFFVLTVPVVQLTKVMKRIFIPKVLIELTILIYRFIFIFLEEATAIRKAQSLRFGYHGIKNSYRSFGMLVNTLFNRVMKRYNEMVVTLDVKLYQGEFHI

SEQ ID NO: 45 - protein, 98 aa, Listeria monocytogenes
MKKININVILILLVVLLMVSPFFFNKTGEYGGSDGEAEAEITKIDPSYEPWFEPLYEPKSGEIESLLFTLQGCIGTGIIAYVIGVSRGKRKAENDVNH

SEQ ID NO: 46 - protein, 244 aa, Listeria monocytogenes
MKKLWKFLPFVLIGVIYFTLTNPESAHAMHIMEGFLPVKWAVFWLIVFIPFLVLGLIRIRKLIALDKNNKLLLALCAAFIFVLSALKIPSVTGSCSHPTGVGLATVMFGPLVVSVLGVIVLLFQALLLAHGGITTLGANAMSMAVIGPMVGFVVYKLARKLNCNRSVSIFLCAMTADLATYLTTSVQLGVVFPDPASGMMASILKFMAIFCVTQVPIAIAEGLLTVVMYNLISKNLPEKVAQLR

SEQ ID NO: 47 - protein, 236 aa, Listeria monocytogenes
VAKFYGIGTGPGDSKLVTMEAAERLGDVAILYTPQPKKGGESLAKKIVSPYLKDTLIIKERHFPMSYNKEEKMLAWKEIAEEIKADVQNGHDVGFITLGDPMVYSTYSYLLELLKGDIETVTLAGISSFSNIASKIELPLVMDEESFAVIPVTAGAEKIEQALTLFDTVVLMKAASNIPLLTTLLKKLNLLDAAVVVSDVAMATEKITYSMRDINPEEKMSYFTTIIVKKRREQYK

SEQ ID NO: 48 - protein, 261 aa, Listeria monocytogenes
MKKAILVVSFGTSYPETREKTIEACEKRVAHEFPDYTVFRAFTSNKIIKKLKTRDNMHINTPSQALNQLKELGYKEVIIQSLHIISGGEFEKITAQVEKFKPDFDSIIVSQPLLDSMEDYEKAIEAIRHQMPPLKEQEALILMGHGSKHHAFSAYACLDHMLLNEPIYLCAVESYPGLDQVIERLQQADIKKAHLMPFMLVAGDHATNDMASDEENSWKSTLEQAGIQTECHLQGLGENPLIQSQFIDHIHTAIERVKTRG

SEQ ID NO: 49 - protein, 493 aa, Listeria monocytogenes
MGKVMLIGAGPGDAQLLTVKGLAALQKADVIVYDRLVEPAMLQERKASCKLIYVGKEPLHHPIPQDEIERILVREAATNELVVRLKAGDPYVFGRGGEEGETLHKAGIPFEVIPGITSAIGGLAYAGIPVTHRDFASSFHVITGHLKKGRDPLDWEALARLEGTLVFLMGMTNLPNICANLLEHGQKPETGVAIVQWATRGKQLTVTGNLQTIEQKVAESGISSPALIVVGDVVSLRPQLNFFEEMPLFHTKVLLPRARAGKSMLAEQIRDLGGEVTMYPNIQVLDVAPTKTKEQLSEVSELLFTSKEAVERFFDYLAKLDLDIRSLKNSHLTAIGKQTKEAFSEKGIIPDSFIKRRSTELILEHLPRLQKNVSNLIIGSVVDTTEVNVILADVKAIEMMPLYDMRPVTERPFDLESFEQVCFSSSRSVQNLLDVLTIEEKAILQTKTILSIGRFTSATLASFGMNNFIEAESATPESLIELIQKTKLEGVPQ

SEQ ID NO: 50 - protein, 250 aa, Listeria monocytogenes
MIFVLGGTSDSLLISDWLTETKQAFILSVATDYGETLAKQHAENVFCGRLSKEEMLLKWNAENVHLVIDATHPFATIVSETAMEACKEADIPYIRFERTSEQTDNTYLVADIEEACAVAMKLGKRIFLTTGSKNLPEFVDGLKSRHIIARILPVSDVIRSAEELGLVADQIIGMKGPFTKDANRTQLEMTGADVLITKESGKQGGFQEKLTAAAELNIPVIVIRRKKLNYPIEINHLTELPEILSQLEVY

SEQ ID NO: 51 - protein, 241 aa, Listeria monocytogenes
MIYVIGIGPGDKRLMTGEALQAIEDAEVIVGYVTYIKLIKELIKDKEVVKTGMRREIDRCQEAVDIALTGKKVAVVSSGDAGIYGMAGLVLELAEKSNPDLEVKVIPGITASIGAAAVLGAPIMHDFCHISLSDLMTPWEVIEKRLTHAAMADFVVCFYNPRSKGRANHLANAFQKMMEHKSGDTVVGIVKDVGRKEERKIITTMQGIDYELVDMTTVVIVGNKETYVKNGKMITPRGYSL

SEQ ID NO: 52 - protein, 343 aa, Listeria monocytogenes
MSTDKLAIIAVTERGRDLAITLTKTVAATIFVPEKHCTEQTNSLTPDFGTAMREIFTKYQALICIMATGIAVRTLAPVIEDKLSDPAVLVMDEHGKFIISLLSGHVGGANELTERIATITGGAAVITTATDRANVAAIDNIAKQLNGYLPDFKATTKRINGLLAAGKEVGLYIDEPLEIDTRGFTMEEVSPQVYISTKYKLQVATHERIQLVPKQFILGVGCRKGVSAETIDAAFTHFCEQENIHPRAFREIHSITLKAEEPAILHLAEKWHVPFIVHPAEELQTVAGKYPTSAFVQKTVQVGNVALSSADIGSNGNVVTSRFAENGVTFAAGKLTKNSEVAK

SEQ ID NO: 53 - protein, 249 aa, Listeria monocytogenes
MAEVHFVGAGPGDKELITLKGYQLLKEADVVIYAGSLVNPELLEYCKASCEIHNSASMNLIEIIDCMEAGVTAGKEVVRLQTGDFSIYGSIREQVEEMKKRSIPFTCTPGVSSFLGAASSFGVEYTVPEVSQSVIITRMAGRTPVPSRESLRSYAAHQTSMVIFLSVQGIRKVVSELIKGGYKPETPAAVIYKATWAEEKKVTGTLEDIAEKVTEAGITKTALIMVGDFLGEEFYYSKLYDKDFKHEYR

SEQ ID NO: 54 - protein, 189 aa, Listeria monocytogenes
MKDEVFIRGKVPMTKAEVRAVSIDLLSLDEKSKKLLDVGAGTGSVGLQVACNFPKIHVTAIERNPDAVDLIKQNQAKFGLENIAVIEAYAPIELPEKETFDAIFIGGSGGNLTDIIDWSLAHLIPGGRLVLNFILLENALTAMNHLEKLTVSELTMKQIQVSSWHKLGAGHYFEPQNPTVIIGCKKLEE

SEQ ID NO: 55 - protein, 198 aa, Listeria monocytogenes
MITVVGIGPGDTNLLINEARQALNSADIVYGSTRQLQEIAELTNAVPMLLPKKLADLKNIPHQSKNVVILASGDPLLYGIGNWAMANFSEDIRIIPGISAIQMMFHQIKLPMNNCFITSSHGKMPNFDFLLQHEKVAMVTDTIIGPYEIAAEILQRDLKKILFVGENLSSKEERIHRLKPEEVAKKYDMNVVVIVDER

SEQ ID NO: 56 - protein, 373 aa, Listeria monocytogenes
MEDFIYYNGKKYRKGYTTGTCAAAAAKACVEMILTQEEVSAVQVTTTGGTILEIPVAYQKFSKDKATAAVQKDGGDDIDATHGMWIFVDIDLTDNAEVVLDGGVGIGRATQKGISVAVGEAAINPAPRKNILATVRESLGENRGAKILVYAPEGEERAKRTMNSNLGIIGGISILGTTGIVTPMSDEGWKKSLSMELEMKRNQGLDQIILVPGNYGDDFVQNTLGFSSGNIVSMSNFVGYMLKETQRLAFKKVLMVGHFGKLVKVSAGIFTTYSKDADARAEILVANLALLGAPLSLLQAVEKCNTTEAAGELIEEAGFTQVYEVIAQKIKARSERFLKFTKPSVEIDVVTFSTERGLLAATKDIDVLREEWR

SEQ ID NO: 57 - protein, 210 aa, Listeria monocytogenes
MNYIKNPAKIEEKSFEIIQQIIDDIRPDYTFQNKLEEAIIKRAIHTTADFDYLDSLVFQQDAIAKIIHVLQNKGTIFTDTNMALSGINKRLLDELGCKYHCYVSDPETMEIAKQHGITRSMAGIKLASLKDGPKLFVLGNAPTAVYKIIEMVESGQLQADAVVAVPVGFVGAAECKEEILETDIPAIVARGRKGGSNLAAAIINAILITM

SEQ ID NO: 58 - protein, 315 aa, Listeria monocytogenes
MILLFYTSSFILDCLLGDPYSWPHPIKAIGNLIKWLTIILRKIFHGKSLYFAGGLLFVLTVGMTGAVSWFILFLSAKIAYWLYVAVFVYLGYTTLAMTCLAKEARKIQRTLADGDLAAARVQVGMIVGRDTDKLTAEEISKATIETVAENTADGVIAPLFYLFIGGPVLALMYKAVNTLDSMVGYKNEKYRAIGFVSAKMDDIANFIPARLAWFFLVIASFILRYDGRASWQIGLRDRKNHTSPNCAYPEGAVAGALGITLGGTHEYFGETVVKPTIGSGTKPVSEKEISQTIHLLYMASTIAFIMFASIYLLLF

SEQ ID NO: 59 - protein, 119 aa, Listeria monocytogenes
RSIAPFINEKWFSEATRLIITPAMVNSGSKRLNPSTIAAAEVDIALPSTTKITGVFVHLAIKDVLELSRSIPSPSNSPITPSITEISADCPCFSKRAASIASSSIRKLSKLMDATPVIA

SEQ ID NO: 60 - protein, 361 aa, Listeria monocytogenes
VKITTASHGGNYNELAKQHGLTKEMVLDFSANINPLGVPASLKQTITANLDKLVEYPEPDYLALRARIASFHQLDLANVIPGNGATELIFGIAKVTKAQKVLLLAPTFAEYERAFFDAEIVYAELTKETNFAAVEIVLEILERDTEIEAVCLCNPNNPTGQLIAQQEMIKIADLCEKRNIYLIIDEAFMDFLEENETISMINNLERFPHVAIIRAFTKFFAIPGLRLGYLLTKNDLLAEALMQMREPWSINTFADLAGQMLLEDEAYIRQTFDWINEERDFLYRGLSRFSALTVYRPTVNYIFFHLEKPLDLRKELLLKGIFIRSCANYRGLTENYYRVAVKSRADNSQLLTALEVIFSGN

SEQ ID NO: 61 - protein, 294 aa, Listeria monocytogenes
MLLQSKSNEMLIEKVMDEFSAATSLASVVVDIHGTEVSRLCNFTPFCQLIRSNPKYRSLCQKCDMFGGLEASKTGKPLIYRCHAGLTDFSVPIVVENQLSGFLLSGQVICEESSEVGNIQTEETDWKNDKDLISAFRSVPVFSSKKINSSAEMLTIISQYYLKSEMEKSREEQKQKIVFHHTKVAHHEENKEIRKALKYIEKNLNRPITLDEVASHVYLSSYYFSKLFKKEMNVNFINYVNQKKMSLAKEMLKNPRLSIDNIARNLGFTQTSYFCKVFRKEFDVTPKGYRETFK

SEQ ID NO: 62 - protein, 191 aa, Listeria monocytogenes
VQLIFARHGETDWNVAKKYCGQLDVPLNEHGVQQMKHLREKLEDYSFDLVVTSDLMRVKQSANILSNAKTVRFPALNEMNFGDFEGYTYQEISTKFPKAWNEYCNNWQTALFPNGESFPIFYERVVEVLEVEMEKWQQIDTVLLVGHLGVLRVIALFLQKQTIAQYWDIDFKQGCYSLWDNKSQRFLISNQ

SEQ ID NO: 63 - protein, 248 aa, Listeria monocytogenes
MKTLILLIQFFTRIPLPIQINMDEINLKKGSALLPFVGVIIGAWNWLIFTLVALVMPLPVAIIAGLFAEVIITGGFHVDALADTADGLFSSRKRERMLEIMKDSRVGANGVIAICFYFLFYGALFLSVTDTQQICWLFFVLPIVAKGVTMLLFAKMTYAGSKEGLGSIFLGVPWWPIVIAQVIVLAVLGLFFSYVGVIAYVGVILFTIIYRAFVYKRIGGMNGDTLGAGGQMGQLICLFCLVLLWGLV

SEQ ID NO: 64 - protein, 185 aa, Listeria monocytogenes
MSEMMLVTGGARSGKSSFAEREAAKYDRVLYVATGIAFEKDTEFQARIKKHQATRPANWDTFEAFQGIASYLDQHSTQYDVMMLDCVTMLVTNLFFTLLGERELTNEIADEVEAGIQAEVSAILEAGKASQAKLIFVTNEIGLGVVPENKLTRVFRDIIGRVNQQIATQVEEVYLVVSGIPKRWK

SEQ ID NO: 65 - protein, 628 aa, Listeria monocytogenes
MPEKNIVLIGAGYAGVHAAKKLAKKYKKDKDVNITLIDRHSYHTMMTELHEVAGGRVEPTAIQYDLRRLFNRTKVNLVTDNVTHVDHDKKVVTTEHGSYPFDYLVLGMGGEPNDFGTPGVGENGFTLWSWEDSVKLRNHIEETVTKASREQDVEKRKAMLTFVVCGSGFTGIEMVGELLEWKDRLAKDNKIDASEIKLVVVEAAPTILNMLERRDADKAERYMVKKGIEIMKNAAIVEVKPESIVLKSGEELPTSTLIWTAGVRANSDTKDYGMESARAGRLKVNQYMEAEGLKDVYVVGDLAYFEDEEGKPTPQIVEGAEQTALTAAKSIIVEMSGTGEKEPFQGKYHGVMVSIGAKYGVAHLGGMHLSGWFAILMKHMVNLYYFFGIRSGYYMWQYIMHEFFHIKDHRNIFRGWTSRYGNVLWVLPLRVYLGWFWIDEALSKIYGETTWDKVSITNLKPLFNGIGSDSWLTATTSKMPFEWLQTAATSGASQAAGDAAGAAATNVTTPILSHMPGWFQWIMELLMPNLDVALVMQKVVPFVELAIGLAMVVGLFTWLVSIGSAGFLVMFTLSAMLGWDKFWALPASIALLNGAGRTFGLDYWAVPWFQKHLGHWWYGKPRSVYRDK

SEQ ID NO: 66 - protein, 247 aa, Listeria monocytogenes
MINNYVDITVRLLENILDNEADYVKEAGAKVAKSIENDGVIHLFGCGHSHILTEEVFYRAGGLAAIHPILHEPLMLHEGAAASSVLERKNDYAKTFMVEEDIRPGDIMIVLSTSGRNPVPIDVAEIAREKGAFVIVITSLQYSASQKSRHKSGKRLSDTGDIVIDNGAVKGDAVLKSANFDIAFAPTSTVTGAVILQSIFAEAIEKMVNDNFTPPVFISGNVENADAHNQALVDKYKERIPLLGMNL

SEQ ID NO: 67 - protein, 280 aa, Listeria monocytogenes
MTLSFSDTYRLNNGIEMPRHGFGVYKLTDEARMRTALETAVDVGYRLFDTASFYHNEKELGDFFASSGLKRDEFFVTTKMWNTEQGYDETLRAFEKSQKKLQLDQIDLYLVHWPKQDTFFDTWRAVEKLYDEGLVRAIGVSNFEAHHLDRLRTSANVLPVVDQLETHPHFPNHLLHRYLEELHIVHQAWSPLGRGGVLQEQILIDLAEKHGKSPAQIVLRWHLQNNISIIPKSETPSRIRENAAIYDFELSEADMRQVERLNTGERVSHAPDVMYVRSEI

SEQ ID NO: 68 - protein, 221 aa, Listeria monocytogenes
VEKLFTYKEFVDMMQKYGIRHTKRKLRRGENLMENASKFSNVVLLINGYISSYTYESPEKLLSIFEPGIFLRYSILEDQPEFVTNIALSDNCEVYEYKKEDIEYALTLFPENFGFQYFFLKRIGRHLYYRALLNGKEHKEKLYYAMKYLGELIGKTDENGNVSLPPEVTLKVLIEYSTLSKAAFYRQRIRLLEQEILKPHENTFIVQKKVASHYENQLTSI

SEQ ID NO: 69 - protein, 315 aa, Listeria monocytogenes
MKWEEKRDMVKIATWYYHYGWTQAQIAKKIGISRSIISKTLQRAKDLGIVEIFIKDETYYTVDLEQKLEEKFGLEEAIVVATHDMSEEEALNFLAKEAAYTLSKRIAKVKTLGISWGKTIRKFANEFPFIPHKDLTIIPLIGGMGSSDIDLHSNQICYDLKKKMKCHSKYLYAPALVEDTEMKTDLSKNKYISEVLEEGKTVDMAIVGVSSPYNHSTMEEIGYINSEDIEELRYKDVVGDINSRFFTADGKEAKTEINTHVIGLSLEELKNIPTVVALANGLQKKEALVAALNAGLIDVIVITDRMAEYILQKND

SEQ ID NO: 70 - protein, 416 aa, Listeria monocytogenes
MTLYRQLLARENENNPIRVGVIGAGQMGFGMISQIAAIPGMSVVGISDIHVEAAQKAADAYNATATKKEKILLSNDFKEIIHSDLVEVIVDATGVPEVGAKISLETLLAKKQLVLLNVEIDITIGPLMKKLYDSAGLVYTGSDGDEPAAITELYEFSKSMGMEVLVAGKGKNNKLKISANPDSCQVEADGKNMASHMLAAFQDGTKTMAEMNLLSNAIGYVPDVVGMHGISGDVDSVIKDLDLKDQGGILNKFGVVEYVDGLAPGVFVIVKGQNEGVSHELSYLMKKGDRDHHILYRPYHLASLETPLTIAKAVLNHDHAIVPMGAPVSETVAVAKKDIAAGEKLDGIGGFCVRGVLETHVDMATNGHIPIGLISGEVVARRNIKAGTFITDEDVSLDESTTVWKLRKLQDETFSK

SEQ ID NO: 71 - protein, 126 aa, Listeria monocytogenes
MNIVLIASLIFIAQTCLGFFQVKYYQHHMNKVANKYAGKIGYHLYSEMERLKFRTSAVAILVVNENHIVHECQILTGKTVFAQFKTFTNYHHKELSEILTELSSKNKNTIQEKAIIKTVNSCMKAL

SEQ ID NO: 72 - protein, 173 aa, Listeria monocytogenes
VNYIEWFGTNFIGLFEAGGKQFVSFMTGIVPLLIVLLTFTYSIIAFIGEERVNRAIQFSAKNMILRYTLMPVLSVLMLTNPMAYTFGRFVKEHQKPAFYDSVVSFLHPVTGLFPYANAGELFVYLGIANGVVEAGYSMSSLAVRYFLAGIVVILMRGVITETITKFLMRKEKV

SEQ ID NO: 73 - protein, 328 aa, Listeria monocytogenes
MYQSIHVNKGQGGWGVGLDITPSEPRTKVVSITGGGIHPVALRIAELSGAEAVDGFKNSIPEEEMMCVVIDCGGTARIGVYPMKRIPTVDVLPSSPSGPLAKHITEDIFVSGVKPEDIEVRDISAEPGKPFDREKFKEDYAKIKEDQKEASELKEGFLVKFSRGIGKAMGVFYQAGRDSVDMLIKNIIPFMAFISMIIGIINYTGIGKLIANTLSPLAGSLWGMLLIAFICSLPFLSPILGPGAVIAQVIGVLIGSQIAIGAIPVTYALPALFAINAQAGCDFIPVGLSLAEAKPKTVQFGVPAILYSRMITGVLAVVIAWVFSIGMY

SEQ ID NO: 74 - protein, 81 aa, Listeria monocytogenes
MESRSNKFGRKKNKKIGKLHKSYDAYLMELIEVTQENWHKQKVLMRKSFEYDPNLEYEEKKAEARYFYLFKEARTRQLKNK

SEQ ID NO: 75 - protein, 116 aa, Listeria monocytogenes
MTISKIMEIGPLVPAFEEEKIVILFGPTATNELREISVIHEFQDAPNNALTKGNTLLIGEQVYTIEEVGTDANKNLEELGHISVYFRSGQNEVLPGAIVVSPEVFPTITVGDSIQF

SEQ ID NO: 76 - protein, 306 aa, Listeria monocytogenes
MYQKHKWAAILMTVLLAVVLTACGSSSDKDSSKEKESATKTVTDTTDRKVEVPTTPKRIVALQNVSEMEILGVKPVGTTDYYITTYPDATKGTESVGNDKPSIEKIANLKPDLIIISDYQKDLLENLEKVAPVYITHFGDTPDKQLSNIANLLNKKAEKEKWDKDYAASSKEAKATLKDAGVANEKAAVIQFYGKEIYVHDAKVFDGLYSGAGFTPTDAAKANKETKAISSEAIPEYAAGADRLFILMPADGNTDSVDEMLKGVWKDIPAVKKNQVYKVDNTKWSDYSAAAQLYQMEDAVKQITGK

SEQ ID NO: 77 - protein, 397 aa, Listeria monocytogenes
MNRRERRKHKRRKNMIIVLSTVFLMFIATSWMIYEFKSKQEQTVSAPTKKKAATATNPSENAATNEPEETKDPEPVEEKPKETIVKNQEIDNYLQKIGFSGSALVVRDGETIIQKGYMYANRDDKVLNTPDTLFYIGSSQKAIIATALLQLEEKGKINTNDPISKYIPDFPNGNKILVKNFMNHTSGIVGRPNLTSNMTPDQIVKAIEKRGIKSQPGKWDYMDANYTVVGYLVEKISGQPLATYLQENIFNPAGMKHTGYYQKDVDGGKNVSTGYKIDENGVFQSPKLADLTKLYGAGDISMSTTDMYLFDKALMDKKLISEASLKKMFTKGSKSTYGMGFYVDPGSYNSHGVVTGWDVSNSFSHTGRTYVILFSNVQNYIASFGKVNNDIYGFLNK

SEQ ID NO: 78 - protein, 338 aa, Listeria monocytogenes
MVQITKGKFDGLQRLSNDKGVIAALAIDQRGSLKKMIQQAKGTENKKDVEDFKQLVSEELTPYASAILLDLEYGTPAIKARHEGSGLLTSYEKTGYDATTPGKLPDLIEDLSALRIKENGGDAVKILVYYDPDEPAEINEIKYAFLERIGAECRAVDIPFFLEPITYDATVTDSGSLEYAKLKPAKVKASIKEFSKPRYGVDVLKLEVPVNFKYVEGFAEGEVAYTQDEAARHFEECSDLSPLPFIYLSAGVTSEMFHKTIQFANQHNVQYSGVLCGRATWADGIEVYGKQGDDALREWLRTQGKENITSLDKLLDEGAVPWWTKYGSFEDVHVVEKQ

SEQ ID NO: 79 - protein, 393 aa, Listeria monocytogenes
MNQKIKQIVLNNESEMIAFRRDLHMHPELQWQEFRTTDQVAKELDKLDIPYRRTEPTGLIAELKGGKSGKTVALRADMDALPVQELNQDLPYKSTEDGKMHACGHDAHTAMLITAAKALVEIKDELPGTVRFIFQPSEEIAEGAKEMIAQGAMEDVDHVFGIHIWSQTPSGKISCVVGSTFASADIIQIDFKGQGGHGAMPHDTIDAAVIASSFIMNLQAIVARETDPLDPVVVTIGKMDVGTRYNVIAENARLEGTLRCFNNTTRAKVAKSIEHYAKQTAAIYGGTAEMIYKQGTQPVINDEKSALLVQETITESFGEEMLYFERPTTGGEDFSYFQDEAPGSFALVGCGNPEKDTEWAHHHGRFNIDESVMKNGAELYAQFAYNYLNQAEI

SEQ ID NO: 80 - protein, 423 aa, Listeria monocytogenes
MQTNLERIKKHIEKLDTFTATPGQGTTRLTYSKEDLDARNYLKQEMAKVGLTVSEDAIGNIYGRLEGESPDLPAVIVGSHFDSVPNGGAFDGPAGVITGLEVASVFHEQQIKPHFPLEIIAMVEEEGSRFGAGLLASRAITGKVTTEMLHEMKDIDGITATDAMAKLGFNANRVHRAIRTKESVKAFIELHIEQGPILENASEDVALVDTVVGLTQIKVTVKGQAGHAGTTPMLDRKDALVSAVEILGQLPELAIQEGGGTVLTVGKLNVYPNGANVIPDKVIFTVDIRAKDEIHVQNTLAKTKEIIQATEKNGITCEIKDMIYQQPTHLSKEIHQALTESADQLGFKYRTMVSGAGHDAMIFASLTEVGLIFVPSHNGISHAPEEWTDYDKLQKGIEVVLKTVKKWTEESANESENKTNSFK

SEQ ID NO: 81 - protein, 440 aa, Listeria monocytogenes
MKKGVKIVTIGGGSSYTPELVEGFIKRYHELPIRELWLVDIEAGREKLEIVGNMAKRMVKAANIDCEVHLTLDRREALKDADFVTTQFRVGLLDARIKDERIPLSHGIIGQETNGAGGMFKAFRTIPVILGIVEDMRELCPDAWLINFTNPAGMVTEAVLRYGNWDKVIGLCNVPIGAVKSASDVLEKPEEDLFFKFAGINHLHWHRVFDKDGTELTEKVIDGLYAPDANPGKVVENIKNMRFLYEQVKHLKMLPCPYHRYYYMTDAMLEEELASFKNEGTRGEVVKKLEDSLFELYKDPNLDYKPEELSKRGGAHYSDAACEIINSIYNNKGTVMVVSTRNNGAIDDVPYDSAVEITSVIRAHGAEPINFGKFPPAQRGLLQVMKSMEELTIEAAVTGDYATALQAFTSNPLVPSGDLAKTILDEMLEAHKEFLPQFAK

SEQ ID NO: 82 - protein, 198 aa, Listeria monocytogenes
MHYPEPITKLIDSFMKLPGIGPKSAARLAFYVLDMKEDDVLDFAKALVDAKRNLSFCSVCGHITDKDPCYICADTSRDRSVICVVQESKDVIAMEKMRDFHGLYHVLHGTISPMDGIGPEDINIPDLLKRLQDDTIEEVILATNPNVEGEATAMYISRLLKPSGIKVTRIAHGLPVGGDLEYADEVTLSKAMEGRREV

SEQ ID NO: 83 - protein, 322 aa, Listeria monocytogenes
LANIQEIAKLAGVSSATVSRVINKRDYVSDETRKRVQTIIDKLDYVPNINAVSLKKGATKLIGMVIPSFTDSLNVFLKSFTMIAQEHGYNVTLFMTRIDPDKELEALEMLRQKQIDALVLVIRSNDWKTIEHYTKYGPIVTWQRVESEKIPSVFMNQYDGYTLGLEHLYAKGYRKFVNVYGNTTGLNTQSRMLAFKDFCARYELDPHEFRQFYGQGSRQDGEKIAHWFAETEHKPDAFLTPNDYFAAGLLTEARRLGYSVPEDFAICGFDNMEVAHLLDITTIHYPVNLQAENAFMLIMNQLFGSDLPLLDLDFRLVERKTT

SEQ ID NO: 84 - protein, 451 aa, Listeria monocytogenes
METNQILETIRMIEEEKLDIRTITMGISLLDCMDGDGEAARKKIYQKIVTKARNLVAVGEAIESEFGIPIINKRISVTPIAIIAGSSADTDYVEFAKTLDAAAKEVGVNFIGGYSALVQKGYTKGDEILIRSIPQALAQTERVCSSVNVGSTRTGINMDAVRQMGEVIKETADLTADTQGLGCAKLVVFANAVEDNPFMAGAFHGVGEADCVINVGVSGPGVVKRAIEKVKGEPFDIVAETVKQTAFKITRMGQLVGQVASEKLGVPFGIVDLSLAPTPAIGDSVAHILEEMGLEMVGTHGTTAALALLNDAVKKGGVMACGHVGGLSGAFIPVSEDAGMIEAVQQGALNLEKLEAMTAICSVGLDMIAVPGDTTAETLAAMIADEAAIGVINNKTTAVRVIPASGTKVGDMVEFGGLLGTAPVMPVNGKSSVDFIARGGRIPAPIHSFKN

SEQ ID NO: 85 - protein, 89 aa, Listeria monocytogenes
VRAVLTVIGKDNVGIVAGVSNKLAELNINIVDVSQTIMDGYFTMMMMCDISQITKEFDEVKAELAGKGEDLQVKIHIQREEIFNAMHKL

SEQ ID NO: 86 - protein, 276 aa, Listeria monocytogenes
MNLEEIVDCMLLNENDKEIQRTQTEHRIKLVDFWRVKKGDRVLEVGCGQGDTTAVLANAVGASGFVQGIDIAPRTYGAPFTIGDATDHLQKSKLGAQIDFKLGTDILKGDITFPDNAFDVAVLSHASWYFSSKSELTLMLELLSKWAKRVCYAEWDTRITDVKQTSHMLAVLTQSSYEAFKQETQSNIRTFITPIDMQEIIQEHNWKMGAETSIFSEKMQDSRWEIGYVKDFITKELEADLGLPEKFKAFLLSQSKLITLENSLPMASYYTSWQAK

SEQ ID NO: 87 - protein, 284 aa, Listeria monocytogenes
MKKITNNLFADIGFLFFILLCFITIGFMINTPDEYLRNIILLNITFLLVIITYFTNLTLGLILNVLYIFIYATYIIYEIVANQIAYGFGSYFWLIITPLFTVASAMFTRNTSRLQEENTKIKQQNLYLGTIDQETLLKNIVSFQNDERIFSSISRRYDLPLSLMVIKVRHWRELKRFQSEDEMRLALQDISAILETCIRTSDVLYLLDKDDATWGLLLLTDEPGGKLVADRIKSRIAEANTEEFAAKYRVKLELRIGTSQFDSEKVKTPLDFIDLATKELEYDV

SEQ ID NO: 88 - protein, 683 aa, Listeria monocytogenes
MKKFTVMWLLIFAVLFLYRPEVFAADKNYQTVFGTDKTAQGKFTTTKQNFTVENYWDVSNANVKLVYTITQLSEKEVSTMTLKINDVAFYSFKPDKADKGTKQIEIEIPKDKLKKGVNVLSIESFVYTDLPDGRCTIDDTPANWLQFDKTSAINVSYSDKAFQKTIAEFGERFTGIDTVKSEQGAVAVSNKAGDAELGAALEGLSGFSAANTLEDKNIAFGQYEEAKIRDGKNYLVLFSSYDNLPNDLKLQIKDDNKLEKQALFQVVTVGNANTLVITSKSNDALKKAGKLIANQNYLSQLGTNTKWLTTDERIDTPATSVDKNTKLTTTGDKLKGIGHITQDYFISMPANRSASTGTEVSLDFRYAQNLDFEHSLVTILVNGKPIGSQKLTAKKANGDKLTFQIPSDLNVKGDFSVTVAFDLVLTNNYCGFIADSEIPWAYITPESKINLNTSEETDLLFEQYPYPFIANGDFNNAVVVVPDELTTEDTDSLANIFNLLGRFHDGNRGDLTAVHAANWKKPKEESNVIAVGTMNNNPVIKNANDDLYFQYNKTGDYFLSNEKISIEKNYGKQLGSVQLITSDGVPILAVTGPGAKQTELGSDLIATKANLAKIYGDGAIVDTDNTIHSYRFKKEADTQEESFGAKISNNKEVTVFGAFALLTVVILVVAVLLILRKYRRSRK

SEQ ID NO: 89 - protein, 105 aa, Listeria monocytogenes
MRGMGNMQGMMKQMQKMQKEMAKAQADLEAQEFTGTAGGGMVTVKATGKRVITDVVINEEVVDPEDIEMLQDLVLAATNDVLKQIEDTTSQTMGKFTQGLNIPGM

SEQ ID NO: 90 - protein, 416 aa, Listeria monocytogenes
MVVADYLALFAVICIWGLLLINIVLIVAGYVYYLKNEARKVPEIPVEVPFVSVMVPAHNEGKVIVKTVESLLAFDYPVDRYEIIVINDNSSDNSAELLAAIQAKNPTRFLKIINTDNITGGKGKSNALNIGFAESRGELVAIYDADNTPERQALRILVGEITNDAKLGAVIGKFRTRNRNASWLTRFINIETLSFQWMAQAGRWALFKLCTIPGTNFIVRRSLLEEIGGWDVKAVAEDTEISFRIYMMGYRIKFQAKAVTWEQEPQTLPVWFKQRSRWAKGNIYVILKNVPLLFKREGRRVRFDILYFLSIYFLLLTSLIVSDVLLVLYALGLVHTTLAGLSGALWLLAILLFVAGTFITLTTEKGEISFSNLLFIMLMYVTYCQLWMVVAAYGFFIFLKDTVLKRETKWYKTERF

SEQ ID NO: 91 - protein, 498 aa, Listeria monocytogenes
MRKKMIISILLAFVIFIVGGHSAIAKTDDGVVVFYDSLATGTENEGNMDALLRMLNSLGKRVTIYSWEENPDLSQTSEIIVLQNKNDGLANDWTEKLAKSKAKIAYIGGNPPTFLTDKLQLKTKAITDASITIQTEAGLSGKPQLVNETNLITSYKGTSFGEMDAAENGQAAYGVQAGNYAYAPLFQTDNTSEFTLMDVLKALFDIKTTTNQYAFITGVNPFVDFDLLKKTADTFYEKGIPFIVSAGPVFYNQDFQAAKNYAEILRYVQAKNGTIMLNVPAVTYGDSPSGELESIMQKSVNFFAENDIAPIGVTAELYWNFDKAYGVEGFAPFNTGILLPNQKIIHTTKVNNGSAFEKSPYSVANDFYATTTEGRNFPVDIAITYSFFDNEKELKAAAEELANDNISDFRFQNHGVKTNKDTIESSAGSLYINNQPVALDGDLNYIKTKNKAVKQTGSLEGFFGYQNTFFTIVIILSLGIIGVLFVFGYRLYMKKYMK

SEQ ID NO: 92 - protein, 491 aa, Listeria monocytogenes
MIRKVKSISMWLWHHLTPQIFAVICVFIITIIALFMPPYIGMADNGDFFRIFSSNGLFVNNTNYDALQFGHFVKEFGIYQYFNENQVAIYSSQSIFIQMALLLNKLFWSTTVFDVRFLGGLQLALLLPAIYLLVAGLTAKMKGWPGYVVAALTVFIFADTAYTAYFNSFFSEGLILIMMLYISAGFLLLYQHKYNDYAMLGLIFVASLILITAKQQNAPIAVVIAVCGILVFFIRKNRAFRISAAATFLVIFLSGVVMYAFIPGEFVTINQYQTMTRGVLLDSENPEKSLEEMGMNSEFALLKGTNFYQKYKMIDLDSKLMEKEFYPNYNFVTVLSYYLENPKQFGKMLDLSAQNSFSIRPFEMGNFEKATGYKFKEKTHFFSAYSDVKEKFAPAKFTFLILWALVFLICYGVSAFKHFREKNIRGTLLFDLIVLLIGSGFAVILVTIVGDGEADLTKHNFLFNVCFDLTMLIGAASLLEVYLKKRGERNA

SEQ ID NO: 93 - protein, 246 aa, Listeria monocytogenes
MQIKELAELTGVSVRTLHHYDKIGLLVPQKDDWNGYRIYSEKDVDKLQQILFFKELDFPLKKIQQILDDPLFDKNVALDMQRHLLIEKKQRIETMLATLDLTIKNEKGEITMTNKEKFTGFDFSSNPYEEEARKLWGDKVVEKANEKVNNMSEKEQLTLKESFDAEFRHLASVRKLTPESEEAQLEIDHFFHYLNDTHGNIYSLEAFASLGEMYVNDERFTKNIDQFGDGLSQFLQEAMTIYAKNK

SEQ ID NO: 94 - protein, 443 aa, Listeria monocytogenes
MATQKNLVDLATKAYIYGFPFIFNTQQIERYVTVGIGGTKQVPFNNFTHASRLAEPSDKFVSVNNDTIYSNAPIDVSAGPVVLSVPDTSGRYYVLQFVDAWSNNFAYVGKRATGTSAGKFLLTPPNWNGDVPADMIEIKFPTNIGIIIGRLACDGEADLPTVRELQEQLKITPLNEGKEVDGFPEYDRSLGKELAFFEQLRVYMAQFPPAERDLVKQESFAPIGLMEKGVSPYSNPSEELKNALIEGAKAGLANIKKATTNFKSENGWGLTQHLFDYNADFFEIGTKKSLDWVIEDREEAYIIRAVSAITALWGNHGYEAVYLMTWTDTDGNALNGKNKYTLELNPIPPVDSFWSITMYDLPEYFLCENPINRYSIGDRTPGIQYNDDGGITIVVSKDEPTDPKERANWLPAPDAEFRPMFRLYNPQQPLVDGSYHFPGFEKK

SEQ ID NO: 95 - protein, 117 aa, Listeria monocytogenes
MVTAIQKEQVRTAKNAAFLTSRPEVDYLERESFFITLKDAMKREWVVRLSYFQEADVSSLRLASFEYPYAFLGLGELEKQDLVPLEIDMLTEEVIFKDIVGYEYVIEFRDIIDVELL

SEQ ID NO: 96 - protein, 140 aa, Listeria monocytogenes
MRGYYDEISFDVNTTAKKMHLFLLRSIASYDVTPEQWSVLEGIEANEPISQKEIALWTKKDTPTVNRIVDVLLRKELIVREISTEDRRISLLSLTEKGRKETNELRDIVEVSCEKMFAGVERADLEQFTAILKNISTNIE

SEQ ID NO: 97 - protein, 382 aa, Listeria monocytogenes
LENKTRLWTKDYVFLLLGSVLLYIGFMVFMPTLPARIIELGGTQMQASLAVGLFSIVALLMRAIAGSWNDKFGPKVLIIVGFLILILTTVNFYWSTAVAALLILRLFHGAGWGIGTTSIATGVSKLVPPSRTGEGIGFYGLTTALGMSLAPIIAILIMNYFSFDVLVTFSLVLMVFILILMTQVKIPKSEKIVHQKMKLFEKTALLPAGLCLLMAIPLGGIQTFMMVYGTELGISTTWIYFIGQAIMVLVSRLFAGRLYDTKGHRFVIIPGALSMIIGILILSFATGAISLFIASLFFGLGYGMSQPALQALAVDRAAPHNKGTANGTFLSGMDIGMAVGSFGLSIVATYYNYAIMYRTAIIALVVFFAVYWFTLGRKVKNS

SEQ ID NO: 98 - protein, 363 aa, Listeria monocytogenes
VERVYNFSAGPAVLPVPVLEKVQRELLSYNGSGMSVMELSHRSELFQNILDDAESLIRELMEIPDNYKVLFLQGGASLQFDMVPMNLANGKKAAYVNTGSWAKKAISEAKKIQGVEVEVIASSEDRNFSYIPEIPTVSSDVAYLHVTTNNTIEGTAMFDVPDSAVPVVADMSSNILSSVYDVKKFGLIYAGAQKNIGPAGLTLVIVREDLIGQVEGLPSMLDFKVQAENDSMYNTPPTFAIYVAKLVFEWIKEQGGVAGIEALNRKKAALLYDYIDQSDFFSSPVEPSARSLTNVPFVTNSAEFDKAFVKEAEANGFENLKGHRSVGGMRASLYNAFPIEGVEALIAFMEKFANARKGGEVRV

SEQ ID NO: 99 - protein, 395 aa, Listeria monocytogenes
VFNIQTFNAIAKEGLKTFDLEKYVIDANQPADGILLRSYNLHDFDFPETVKAVARAGAGVNNIPVENCSEKGIVVFNTPGANANAVKELVLASLFVSARPILEGTEWVKELPAEDDVEQKVEAGKKAFAGTELAGKKLGIIGLGAIGALVANDALSLGMDVVGYDPFVSVDTAWRISKEVERAMTIEEVLATCDYLTVHVPLTDKTRGMFNADTLQLVKDNAVLLNFSRGELVDSASVKEALDDGLLRLYITDFATKELLNHKKVHVFPHLGASTEEAETNCAKMAAKELQSYLETGSIKNSVNFPNVEMPYNGHPRIGICHKNIPNMVGQITTELGKYSLNILDMINRSKNEYAYTLIDIDKETQANLEQLKQDLLAVQGVLRVRVIEPLGVTV

SEQ ID NO: 100 - protein, 413 aa, Listeria monocytogenes
MVNIRPFKAIRPIKNLAEKVASLPYDVLNSEEARELGDANKYSFLHIDKAEIDLDPAVSPYDPAVYQKAADNLEQFELDGWLGREANPAFYIYQLTMDGRPQTGLVVCTSIDDYTNGKIKKHELTREEKELDRIRHVDVCDANTSPIFLTYRGKEAINALVESWVNENEPEYDFESFHGVAHKVWAITDAHILEDLSAAFSEVPALYIADGHHRTESAVKVGLKRREEFPDAGPEAEFNFFLSVVFPEEQLEILDYNRVVNVPIEVDFLSKVETSFDVEKVGKEAFKPEKPKQVGMYLDGNWYKLTAKSEVIPNDVIGQLDVSILQSQILTPIFGIEDIRRDNRIDFVGGIRGLEELTRLVDNGSHSVAFAMYPPTMDDLLGVADAAEIMPPKSTWFEPKLLSGLFVHDLESK

SEQ ID NO: 101 - protein, 107 aa, Listeria monocytogenes
MKQISYFYSAENESEINLEIWKMFMNQSEAERKIHFDHTGIVFDIQLGEVGKVDLPERIQMLIDKNGMEALPILVVDDAVYNYGEFSVIDAVEELLDVGVSIQVEED

SEQ ID NO: 102 - protein, 780 aa, Listeria monocytogenes
VSHLKDYTIGIQHIKQLTSEISLGTKLVFAISGQITIKDSEQKFYLQEGDILVLDRNTFYTIEGNEANLFINLTISDTFFAHYYEDYFQHSFKFFSKESDPGRERVVGSLRKSVSELLIASATKKRANKLEAQSALFQILLLLTRFLKKGVPSSARKEVNDKRISRIIREVEERFDEALSLRVFAQKEFLSEAYLSRYFKKTTGLGFLQYLTEVRLKHAIQDLLHSAESITEIALKNGFSSQKHFSEVFKFHFELTPSEYRAEHHAETNLLIDNKASELGASIEQIVPSPEILVNLSRLYHDVEPGKELNKAPFEKKKIDITEKTARCLSENMNILTIGELKEVLKANVQKQIITTRDEIGINYIGIRHLFRGSTFLPETETDELVPTSSPYANADLALTFLKQQNLELFIRIEYQDIVGDVAAVFERLDHFLKHCMQVFGREFVSKWHFMFFEPKNTYADKEELKKLYLKIYHIIKSRFPAIQVGNFVPFSLSKNEVPERHMWFLDVADKIDFVAYNANQNEAVDFSKEDMKSFMISEDYCLSKTRKLKDFLKHHHINKPLMLVNWNTLTGNTRYTNGTFFRGALVLKTMLDLAPEVDALGFWINTELHEGDDSQLNISLDGIEMFHFFDGKRPAFYAVKFLRRLKGVVVAEGADFIMTKHTDGYQLILMNCANINPRYSVEERFTKEEQKELHIRITGLQAGEYQVCKWQFDRDNGALYSKYWQLNSKYGLDKEILDYIVDASQPTLTVSDETITEDWSFYAYLDINAIHFYEFRSTI

SEQ ID NO: 103 - protein, 400 aa, Listeria monocytogenes
MEVWTMKEKLFQKLDEKRDRMIEIRRYLHEHPELSFQEENTAKYIADFYKEMDCDVRTHVGGNGVVVTIDTGKPGKTLAIRADFDALPIQEETGLAFASKNPGVMHACGHDGHTAYMLILGETLIEMKQELTGKLVILHQHAEETPPGGAIQMIQDGALDGVDNVLGIHVMSTMKTGEVFYREGAIQTGRSYFKLKVQGQGGHGSSPHLANDAIVAASEFVVAVQTVISRRLNPFDVGSITIGSFDGKGSFNVIKDAVELEGDVRSMSEEARNIIQKEITRIVSGIEAMFGVTCELDYKNDYPVLNNDEALTDFVVKSIKGAKIPEITDVVRCEPQPPSEDFAYYAKERPSSFFYVGAMPADGHFYPHHHPKFDINEDALLIASKAMGACVVDYLKGENN

SEQ ID NO: 104 - protein, 466 aa, Listeria monocytogenes
MTSTAYKGTNKLIVGIVFGVITFWLFAQSMVNIVPAVQSDLGISSDLLSIAISLTALFSGIFIVVAGGMADKFGRVKLTYIGLILSIIGSLLLVVTQGSTLLIIGRIIQGLSAACIMPATLALMKTYFDGADRQRALSYWSIGSWGGSGICSFAGGAIATYMGWRWIFIISIVFALLGMLLIKGTPESKVVQNTKAKFDSFGLVLFVIAMVCLNLIITRGATFGWTSPITITMLVVFLVSAGLFFRVELRQANGFIDFSLFKNKAYTGATLSNFLLNAAAGTLVVANTYVQIGRGFTAFQSGLLSIGYLVCVLGMIRIGEKILQRVGARKPMILGSGITAVGIALMALTFIPGTLYTVLVFIGFALFGIGLGMYATPSTDTAISNAPEDKVGVASGIYKMASSLGGSFGVAISATIYGVIALSGNIDLAAMVGLLTNVGFCVVSLISVAITTPSAKKALELKAAKE

SEQ ID NO: 105 - protein, 396 aa, Listeria monocytogenes
MRTQLMNMLQERKDEITQIRRHLHEHPELSFHETETANFIQDFYKGKDVEVATEVGNGHAVVVTIKGEKPGKTIALRADFDALPIEEQTELPFKSKNPGVMHACGHDGHTAYLLVLADCLIQLKENIPGTIKIVHQHAEETPPGGAKSVVESGILDDVDQIFGIHVFPFGESGQVYYHSGYAMAGRTYFKLKIQGVGGHGSSPHMANDAIVAGAYFVTAIQTVVSRRLNPFDTGVITIGSFDGKGSFNVIKDAVELEGDVRYMNTENRDKMDAEIHRIVAGMEAMFSVTVELTYTNDYPPLYNDPAVTEQVVASLQKGVGEYLTGISEYDMLSGSEDFAYYLQKIPGVFFYIGAKPKNTSIAYFNHHPKFDIDEDALLVAAKSVADVVLDYYKLNG

SEQ ID NO: 106 - protein, 397 aa, Listeria monocytogenes
MNQVKGERHSLIVLLVLFIGYTSVYVDKYTIGISLVTVSQDLGFDPSQKGLILSAFFLGYTLFQIPMGYLNNRIGARPVLAISIIIVGLFLVIFGFGYSLLFLVVIRFLSGALGHAGYPPSVSNYISLHIPLNKRGFAQSAMLASSGFAAFIGPLLIAQLLLSVGWRNTYYWIGFAVILIGFLILIVVPKAPKIDLNTQKEKIKVPFSELLKDKQLWILLLSALFINAANYGLTSWLASYLNEVRGISISEVSYISSLAGLCILIAGVVGGYFISRFFKGKEPIIIFVFCVLGAFAVYGVYLFEQLALSVICLCLCNIFLIMAFTTLMGLPHKLFQQSHIATKYAAINSGGVLGGFFAPMIIGDLVNATNSYQSAFLFLALTLLVSGLIVLAIKKDQ

SEQ ID NO: 107 - protein, 243 aa, Listeria monocytogenes
MTNKRVAFILGGSGGIGKAVVQKLVEQNFAVAVHYAGNKAKAETLVENIVKSGGEAISVGGDVADEAQMIRAFDFIESQFGGIDVVINTAGIMKLSPIATLDMDDFDLIQRTNVRGTFVVSKQAALRVRNGGAIINFSTSVTRTSFPTYGAYVASKAGVESLTLILARELRGKDITVNAVAPGPTATPLFLTGKDDKTIDNLAKATPLERLGQPEDIAETVAFLAGPARWVNGQVIFTNGGLA

SEQ ID NO: 108 - protein, 175 aa, Listeria monocytogenes
MARLSQEIILNMAEKIIYEKGMEKTTLYDIASNLNVTHAALYKHYRNKEDLFQKLALRWLEETSREIFAWTQDAGQTPDDALHDWLWLLADTKKKRYKTDRKMFLLYTDYIEQNEELVKNHVAHLAQKAEEVSGRTNQGNAIITAFTYFHNPYFASRWEQAGYVDLFEDVWQIVK

SEQ ID NO: 109 - protein, 235 aa, Listeria monocytogenes
MTENTTIAKRILQFNEALANCSFDLPEGYRTVNPYSGDQSELVQKITMAFYQKYYNDTKPRRIILGSSPARRGSAVTGVPFEDAKHIQNETGIFIDKFFINQSSSDFLYDVMTEYGGCKPFYTDFYMNFVCPLGIVRTNAKGNEVNCNYYENKKLQATLKPFILESIRSQIDFGIDTSVCYCIGSGDNFDFVSKINKEHHFFDTIIPLEHPRFIMQYNSKNKDVYMEKYLSALKS

SEQ ID NO: 110 - protein, 272 aa, Listeria monocytogenes
MKIHKLTWVLLIGLLLLSACSTEQPNLYLSANAAAVYSVENGEALYEQNADKVMPIASLSKLMTAFLVLEAVDNNELSWDEKLDLVRLDDPSAVSLYAITQKRTWSVRDLYSAMLTMSANDAAETLGDRLDGADFPKEMNNQAKKLGMSSKTTFVSASGLDVDGKSAVSTTKDLFLLSSKLISTHPEVLETTSKPTVTTDKGAKLESTNDLLGSIQGLDGLKTGFTDEAGYCFIGTAERGGKRVISIVLDAGTAEKRFKDTEKLMEVGFKED

SEQ ID NO: 111 - protein, 457 aa, Listeria monocytogenes
MEFDTIAAISTPPGEGAIAIIRLSGPEAIQIADRIFYAKNSLSEAESHTIHYGHIKEDGEVIEEVMVTVMRAPRTFTREDVVEINAHGGIVSVNRVLQLLLRNGANLAEPGEFTKRAFLNGRIDLSQAEAVMDLIRAKTDRAMGVAIRQMDGNLSRLIRNLRQEILDALAQVEVNIDYPEYDDVEEMTQRMLLEKTELVRASVEQLLRTASQGKILREGLATAIIGRPNVGKSSLLNQLIQEEKAIVTDIAGTTRDIIEEYVNVRGVPLRLIDTAGIRETEDIVEKIGVERSRKALADADFILLVLNQNEELTVEDEALFEAAAGHNYVVVLNKTDLETKLDIDRVRELAGENPIVSTSLVNDEGLEALEEAIKTLFFAGDIDAGDATYVSNVRHIALLHQALEALNGVTTGIQLGMPVDIVQIDMTRAWDLLGEITGDSVQDELLDQLFNQFCLGK

SEQ ID NO: 112 - protein, 629 aa, Listeria monocytogenes
MQTYDAGTFDVIVVGAGHAGVEAGLASGRMGAKTLMLTINLDMVAFMPCNPSVGGPAKGVVVREIDALGGEMGRNTDKTYIQMRMLNTGKGPAVRALRAQADKWDYQHEMKHTIEKEENITLRQGLVDRLVIEDGVCKGVITNSGAIYYAKTVVITTGTFSRGEIIVGELRYSSGPNNQQPSVKLSEHLEELGFELRRFKTGTPPRVKSSTIDYSKTEEQPGDDHPRAFSFDTVEMLLDQLPCWLTYTNETTHEIIQANLHRSPMFTATKKGTGARYCPSIEDKIVRFSDKPRHQIFLEPEGKNTEEVYVQGLSTSLPEEVQREMLRTIPGLENVEMMRVGYAIEYDAVMPDQLWPSLETKLVEGLFTAGQINGTSGYEEAAGQGLMAGINAARKVFEKEPVILGRDQAYIGVLIDDLVTKGTEEPYRLLTSRAEYRLLLRHDNADLRLTEIGHEIGLISDERYERFLAKQSAIEAEKERLQKTRIKPTAEVQAMLKEIGSGELKDGILAADLLRRPEITYDKIAQIVSRETFVTDEIAEQVEIQIKYEGYIQKSNLQVEKMKRMEDKKIPENIDYDAISGLATEALEKLKKIEPLSIAQASRISGVNPADISILLVYIEQGKIAKISK

SEQ ID NO: 113 - protein, 126 aa, Listeria monocytogenes
VKKRWIIATVVLVMIVAGLGVKFYMDEEKLNKEMINVVYSDEAKRVFENGLKNLDAEALTGKGVINTYEIDKKSIKQNPMGGINVTLHVNGDSELYVFFTLNKADDKKLIDDGGGNSAKLEKLLDN

SEQ ID NO: 114 - protein, 290 aa, Listeria monocytogenes
MTGLGTLLFLVGIGVLIFGLVSFRRKNWPRKKTQIIIISSILAIIIGVGIIPTTDEEASTEEPTKQQEKTEKVDNTPVLKAETTFTTDDEGTLVVEGKTNPGAEVTLDFVAIPDAVTTADENGAFSLSVNELDKAQDAVLSIVIDGQTKEQTLKLALTPAYETKIAEKAEAERVAAEKAEAERVERERVAAEEKRAADAKIAAEKKAEEARVAAEKKAAEEKRVAAERSKAAAAQPDTSNEQGQMVYITATGKRYHYDQNCRGLNNSNGETAVTVAQAKAQGLTLCKFEQ

SEQ ID NO: 115 - protein, 579 aa, Listeria monocytogenes
MAYQALYRVFRPQSFQDVVGQEHVTKTLKNAIVQNKTSHAYLFSGPRGTGKTSAAKIFAKAINCEHGHDGEPCNECEICKGTTDGSIPDVLEIDAASNNGVEEIRDIREKVKYAPTVAKYKVYIIDEVHMLSTGAFNALLKTLEEPPKHVIFILATTEPHKLPLTIISRVQRFDFKRITTQDIIGRLKFILEEEKIPYDEKALMIVARAAEGGMRDALSLLDQVISYGSEEVTVEDALEITGSVAQNLLTKLVSAAFDGDAAEAISTLTALLAEGKDPVRLVEDLLVFFRDVLLYQKAPNLEETMERALIDDDFVALAKRADSLKVYEFVKILNTAQQQMRFSNHPGIYVEVALVQLTQAGQSVAGGGNVPADAASGSDVSDLKRQMEQMHQEIQTLKKQIASGAGAAPADKPTQNRGGSKKAINNGKQFKAPIGKINHVLGEAKKENLQLIRGCWGELLSMLMASQAALLNDAEPVAASQDTFVLKFKHEIHCQMAMDNPNFVETITSSIARLTQVNYTFIGIPEDQWADVRENFLHSHGSDADAEDGANPEAKKPAEDPFVAEAAKLVGEDLLEIKD

SEQ ID NO: 116 - protein, 530 aa, Listeria monocytogenes
MKPYVLKFQEIQPHSEALVGGKGMNLGACSNIEGVHVPAGFCLTTEAYKRTLAENNEFTQLLQRLSSLKTSDMDAIREISETIRTLIQHTQIPSEITSDMDAALLDVGGYEMPFAVRSSATAEDLPHTSFAGQHDTYLNIIGRDALLQHISMCWASLFTERAIIYRIQNQFDHHKVQLAVVIQQMIFPEASGILFTADPITSNRKSLSIDASFGLGEALVSGLVSADSYTVQENTITNKIIATKKLAIYSLKEGGTETCPLEKSQQTKQTLTDQQILQLAKLGRKIEAYFGKPQDIEWCLAQGIFYIVQSRPITTLYPIPEVSEPGNRVYISVAHQQMMTDAMKPLGLSFYLMTTPATMYTAGGRLFVDITQSLSAKVSRDMMVNSLGQSDPLIKDALLTVINKKGFLPPLPTEENPNQAPISGKPPVRGIPDPSSVFELVQNSENSIKSLKQTIETKNGSDLFDFIVEDLEELKRVLFNPTSIDAIMAGMDASAWLNEHIYQWLGEKMSPINCQNQHQTILLHKWDLNY

SEQ ID NO: 117 - protein, 821 aa, Listeria monocytogenes
MKSKNNYFKQITTIMTVVSLLIMVLGIQGNNDVKAAPQVAPPASINQIFPDADLAEGIRAELQKSSVTDVVTKEELESISQLSVYAKKIASIEGLEYLTNLKFLNLNGNQITDLSPLSNLTKLTEIYIGDNKISDISPLQNLTNVTDLYLVDNDISDLRPLANLTQMYSLRLGGNSNISDLNPVRNMTRLNNLEVTGSILKDLTPLADVTSLTRLTLSDNQIEDLSPLAGLTKLDNIAAYSNKITDITPVTNLTRLQYLDLGSNEITDLSPVANLQKLTSLHLANNQITNISMLEDLTNLTSLGLQNNKISDISVLKNLTHVTYLQLGYNQIVDVKIIGGLTNLTSLQLTQNHITDISPLANLTKIQYSDFSNQMITNLERNFSKTLSVPNNITSIDGTLIAPETISNNGTYDAPNLKWSLPNYLPEVKYTFSQKIPIGTGTSNYSGFITQPLKELLDYKVTFNVEGNTSEVETVTEENLIPEPTSPTKQGYTFDGWYDAETGGTKWDFTTGQMPANDLTLYAHFSVNSYQANFDIDGVVTNEAVVYDTLLNEPTTPTKQGYTFDGWYDAETGGNKWDFKTMKMPANDVAFYAHFTINNYQANFDIDGEVKNETIAYDTLLNEPTTPTKQGYTFDGWYDAETGGTKWDFKTKEMPANDVTLYAHFTINNYQANFDIDGAVTEEVVNYDALIPEPTSPSKTGFTFEGWYDAEVGGTKWDFKTMKMPANDITLYAHFSKETPIIPSPDEGLDSDSTNGPITINEPSATSTPSQNNNITVTAGENTTELATAKLPKTGDNAPWKTLFAGILLSSSAFYIWRKKA

SEQ ID NO: 118 - protein, 140 aa, Listeria monocytogenes
MRQYMKMVRPFDFVIIILLILGSFLPLILFSVAEAKHVGDDVVAIISQDGKVIREIPLTGHKGNEQFTIKGKGAQYNLMEVDGERIRIKEDNSPDQVGVKMGWKSKAGDTIVCLPHKVFVEIKSTNKKSKDPDTDLIVPN

SEQ ID NO: 119 - protein, 130 aa, Listeria monocytogenes
MDIVTNKIVVEKYNFETIVEENEQFENKIELEVHEVEPVNGNVELMSKGKIFKITIPFLLVLENFRIDGRISRIIQLKDFFGDFSDLEAVDVEGLSNPLIDYIKRLTYDVTEIAFDEPGVSLDFNANHNS

SEQ ID NO: 120 - protein, 126 aa, Listeria monocytogenes
MKIEHVALWTTNLEQMKQFYVTYFGATANDLYENKTKGFTSYFLTFEDGARLEIMSRTDVTGKTTGENLGWAHIAISTGTKEAVDELTEKLRQDGFAIAGEPRMTGDGYYESVVLDPEGNRIEITW

SEQ ID NO: 121 - protein, 335 aa, Listeria monocytogenes
MDTVILITVIIVIVGLAFDFINGFHDIANAVATSISTRALKPRVAIGIAAVMNFLGAISFTGVAESLTKSIVDPFSLNNGEFVVLCGLIAAVIWNLMTWLVGMPSSSSHALIGAIAGASIASASSFSVLNWSGFTTIIIALIISPIIGFTVGYLIYSLFKHLFHDKKLGKMNRRFRFIQIGTAAAQAYSHGTNDAQKTMGIITLALVASGLLKESAGIPFWVQVSCAASMAIGSSVGGYRIIKTVGTKIMKITPVTGVASDLSSLSVIMTATLIHLPVSTTQVIDSSIMGVGTANHKKEVNWRTGKNMVVTWFITLPLAGLLAAVVYWISAAIFL

SEQ ID NO: 122 - protein, 154 aa, Listeria monocytogenes
VNVTQKLYISQKECFDTLVSSAIYDVKNATGKTLQVRKLEGYKYQRTMSNGALATTKIVKVQPNELYQFETSSRVNTHTTTYTIKSTSETTCEVTYNELIETEKALNKMNNIIVGFMFGFFRKKRVKNLLKSIELSVINESKQKQEKLAAKSEQ

SEQ ID NO: 123 - protein, 132 aa, Listeria monocytogenes
MGMIAFLPIFFIFAMFLGLAAKALLAIWIYKDAEQRGMNAVLWCLLMVFINVIIILVIYLIVRNKGEVMKQNLGLLISGIGIAVLNTLMAIIAFIFIISFAVSDGGMHNMMDGYNYDYDDGYEYDMDNFEDF

SEQ ID NO: 124 - protein, 138 aa, Listeria monocytogenes
MNRQTEFTLLIVGASLSILTFLGAMLYTIIFGLNTLMVADTFGYYSSSEETILLGIITFFSVVAAFFALGSAVFGFIGAFKVKSDGPKVKTLGVCFIVLGGLQVFTIHGILFLIAGILTITKKEYKTNSKEDEGTKWE

SEQ ID NO: 125 - protein, 644 aa, Listeria monocytogenes
MGYFAYKRLETLYGMLLDAGSHLSAQKLSQDLHISERTIRTDIAKLTEFLESHGATITLTRGAGYKIEILDPTVFQAFQAEKNKPKNADYFDLDNPEERVKYEIFLLLSSADYIKLEDLADTIFASRATISNDMKQVRKVIASYDLTLVSKPGSGVKIVGDEEKMRYALTALIASKNAPESYLESFFEWHKQKDKLQKLMTAVTDYFFATNIRFTDEALQNLLLHMMILVERIEFGHTLEQFELTDVSEEEILIAAKLATILESLFEIEIADADKNYLLLQIASKRILNVEDKEISEFDDYAYIEGLLNRIESHYFYHLQDDMQLKKDLVAHIHSMLYRVKYHMTVKNPMTEHIKRYYPLAYEITLDAVESLKKDYPYDINQNELAYLALHIGASLERNYQISYYRHKSALIVCGSGFGTARIVEAKVKSAVSNLDITKVVSIQEYNRFIHIEEDIILSTVRIPEKNKPVIKISNIPTNEELKMLGAIIQEQTDPNRGFLSNFFTADFFERSSMTNKTAILEEMVDSLRQQNIVGEGFLQSVLEREKLGSTVLGTGIAIPHPLGLMAKETKIVIRILDKPIKWDQKQSVRAVFLLCISKNDYEEAINIYELLVELVREEYGEKLSRLSDFNAFTALANDILKKK

SEQ ID NO: 126 - protein, 875 aa, Listeria monocytogenes
MTKTKVHVIPHSHWDREWYFTSSRSTIYLVKHLKEVIETLEAKEDYHFYLMDAQSSLIEDYLRYCPEDKSRLEKLIAEKRLITGPWYTQTDQLVISQESIVRNLLYGTRIAREMGHSMAVGYVPDAFGQGGNMPQIYKEFGISKFLFWRGVADNRLKQTEFIWRGDDGTEMLAEQIPFGYYYGANIPENEAELKTYLDEQIGALEEKASTPNVYFPNGLDQAPVRKNLPELVAKFNELDSTREYQIASPETFFADLEKDVTDLPVIAGELTEGKHSRLHKSIFSTRADLKQANNQIENFLSNVLEPVLSISYSLGNRYPHNELAEIWKLMFENAAHDSIGGCNSDTTNRDVKHRYKLASDLATNLLDLNMRLISEKIEQRQPFQFTVFNPLPYEKSGVIKMTAYIPEDNFTVEDTQGNTLEYTILEKTDLTEYVLNQHIDLNPSRPVYLPEKVFLATMLVNVNNLPALGYDTIYFNLEKETAEQEPTQSAATKIENEFYEIQLAANNSLTIHDKKAGRTYTDQMIFVENGDDGDSYNYSPPRKDLVISSKEAVVESIESSISSVNQALTISFKLNVPYNLEERANGEKNNEMIIKTVISLRKNEELIRFDVQIANQVLSHRLCVTFATEIASKFSTADQLFAPIKRPVRLPEMDVWEAEEWQEAPISIEAMQSFVSLHDESHGVAVMTEGVREYEIIGENYDTISLTLFRTFSHMGKTDLLYRPGRASGESIVATPDAQLLGEINATFALTLFESSFDEATIAKKAKEYLSNPQVYQMSDFLNGRLIYVYRDEEKTLDATYSLALPTIDGAIISAVKKAEDSDAFITRFFNPYLQKELIIPEVFQGKERHLDESKSNEKQTTLKHAKVQSYLFEK

SEQ ID NO: 127 - protein, 370 aa, Listeria monocytogenes
MKGKLNEAKDHLMSGISYALPVIIAGSLVVAVAKLIGIIGGVTNLDAYADASGFYHYVYLFQNVGWAAIGLLNLVLAGYIAYSIAGKPALAAGFVGGVLATSTNAGFLGAVVAGFFAGWLTNWVKKHVRITGPAASSLPLIILPLITVGATGILMSLILGGPLGWLNQTLLDWVTEMCKNDTNVIILALILGAMIGFDLGGPVNKAAWMAGNALFMSGIYLPSIMINVAICIPPLGYGIATLLRKKNYSTTFKEAGNGALIMGLIGVTEGAIPFTLRSPGKLIPLNVIACAIGSAVTMGLGAYVKMPPIGGMYGFFTIGNGWAYLVGGLVGAFIIGICANLFVNFTEEETAAADDVLDDIDISFDEIEIK

SEQ ID NO: 128 - protein, 110 aa, Listeria monocytogenes
MKVVGVTSCIAGLAHTPMAAKALEKAGVKLGHDVKIEQQGAMGTIDEITPAEVSAADVVIIAADKVIDGEDRFKGKPVVRVKIGQCVANGEAVLSKVVAAIEARKQKEAN

SEQ ID NO: 129 - protein, 152 aa, Listeria monocytogenes
MIVSEEQLFLNQHLSTKEEVLAFIADKAAEIGITTNSAQVERDLWAREKEYATAVQQLIAIPHAKTEAILEAKLLFIRLVEPIDWESKEGFKAQAIFAILVPASEASQQHLKILSSVAVNLLEEAFQEQILTIKTEHELMDYLKDNLEGELI

SEQ ID NO: 130 - protein, 160 aa, Listeria monocytogenes
MNEAIERRDDDMTIVSFEVEISAPIQEVFALLTTNTGLAKWFNELEVGELGADGYLLFVMTPEEKITMPIRAFEPNQKLAFEWDQDEVAFELNEITANKTRLTFTEQLTTITEHSPRDISGWHICLKKLQASAEGKIYDFNKTEFKTLFAKYQKELNIEK

SEQ ID NO: 131 - protein, 454 aa, Listeria monocytogenes
MNGLTAFLEKYFVPVAAKIGSQKHLVALRDAFISTMPITMAGSIAVLLNAFFRDFPTDWGWTGFVEAMQPLIGINGYVYNGTLAIVSIIFAFSLGYNLSKAYEVDRLAGGLVSLAAFVMNLTVTVSLDAVKAAIAASNANFDVATLPKEFAGIYGFFSLSQVNGTGLFTAMIFGFISTIIYAKLMRRNIIIKMPDSVPPAVSKAFAAIIPALVALYVVGIIDWAFFKITNMDVITWISKTIQEPLLSLSQGYGAVLLVTFLVQLLWFFGIHGPNVLAPVLESLWGTAQLQNISAAQEGAKLPFEWVRGSFDAYVWMGGSGGTLVLIIALLMFSKRADARTVAKLSLAPGIFNINEPIMFGLPIVLNTIYLIPFLIAPMVMVTIAYFATTLGIVGPVKIAVVWVMPPLLNSFLATGGDWMAPVISLINMVVAFLIWVPFVITANRVGVPEEEMKA

SEQ ID NO: 132 - protein, 266 aa, Listeria monocytogenes
MNRIGFIGAGNMGTAMIRGLAQANLVKREEIIVGGRNLEKLKPLEAEFTGLQITTDTEKLVEQADIIILAVKPYTIPEILTSVKEKLTPDKIIISVAAGVTIQDLEELTSAKTKIVRVMPNTPALVGEAMSSVSPNTNVTSEELKEVTAIFTSFGEAEVVSENLMDAVIGVSGSSPAYVYMFIEALADGAVLSGMPRDKAYKFAAQAVLGAAKTVLETGEHPGKLKDMVTSPGGTTIEAVKSLENDGFRSAVINAVQAAAKKNSSM

SEQ ID NO: 133 - protein, 141 aa, Listeria monocytogenes
MQYKIKEMPLEELEPKVVEGLLEHKERLGYNIPKKDTEYIGFAALSEVGEMVGGVTAKISYGELHVSLLSVDPSTQGSGVGTELMAQIERYGRANSCHHISLTTFSYQAPEFYRKCGFTELGRVKDFPIKGEEKYFFIKYL

SEQ ID NO: 134 - protein, 227 aa, Listeria monocytogenes
LNIIATRRKIFFAFIALMISFSVLFLPTTNASAATTYKMTTTADVNVRAADNTKGKVIGFYKKGTTVNFTAKTKNNWYKTTYKGKVGYVSGKCVTTYKAPVATTQSFTALNNEARKHIGKRYKIGATGPSCFDCSGYTQYVYSKGVKKSIPRTAKQQYASAKKIKAKELKKGDLIFFNYGKGVAHVGIYVGNGKMLNAQNNGVKYDTITSGYWKKYIAGYGRVANLK

SEQ ID NO: 135 - protein, 149 aa, Listeria monocytogenes
MDLSDFLNSGWESVLVVLGIVGVIINFLSKAGKGTEEENKKAPQPRPNLRSMHQASRTQTTKKPEKRKVSQGTFTQNKEQDKVIAEQKAAQQKMLREIRRESDVAKGKNIIKSTSSHQKKARKLRGRLQEAIITKEILDKPVSLRKNHL

SEQ ID NO: 136 - protein, 314 aa, Listeria monocytogenes
MTMIGPIIIAVLIIIFLIVFFTLVPVGLWISALSARVPVGLGTLIGMRLRRVVPSRVVKPLIKAVKAGLDLEVNQLESHYLAGGDVDNTVDALIAAHRANIELDFSRAAAIDLAGRDVLEAVQTSVTPKVIRTPEFTGVAQNGVEVKVITQITVQSNIERIVGGAGEDTVIARVGEAVVSTVGETREHTDVLENPNSISKKVQEQGLGDGTAYTILSIDIAEMRIGDNIKAKLDIEKANADMEVAQAAASKRKAEAIALEQENRAAVVAAEAEVPRALSRALEEGNLGVMDYYKMENVQSDTAMRESIAHEDEK

SEQ ID NO: 137 - protein, 99 aa, Listeria monocytogenes
LKHNFTEDDFVYGESWGLVHRGVLEDKEVERMKALRDKVVGKKGVAQTTLKPIGSVRIDGEVYEARLKTGYLEVGKPIIAVGIDFGYVLVNEDIQEGEK

SEQ ID NO: 138 - protein, 221 aa, Listeria monocytogenes
MVKTWEEFLKQEAKQPYFIELMEAVKDARAKGNVYPSEEDMFSCFRLCPYNQVKVVILGQDPYHGPGQAHGLSFSVQKDVRIPPSLRNIYKELKTDLDIEPADHGYLAKWAEQGVLLMNTSWSVEEGKAGSHKKLGWATFTDHVLEELNNYDKPLVFILWGNHAIKAASGITNPQHLIIKGVHPSPLAASRGFFGSKPFSKTNAFLEEHERKPIDWDLNEQ

SEQ ID NO: 139 - protein, 239 aa, Listeria monocytogenes
LNKKKFENLPKWNNFALFNFLAKDKENSLEVMVAARGFAVPGIVATNYETAEEAANVVKELQTTAEVISVGLGGGGDWQNWRDVLHIARLAPNSHINQPIETAGLTNGLLPETYTNALVRPTGKVGIVKLSSGDEITAEEAVDYCLSANIPSIKFMSIEGTKYLDELVYLTKIAADKGIYGIEPAGGIGADNILEITTAIKSTGIPFYMPHIFGKTIDKATGRTKPEEIEKIFAALEGN

SEQ ID NO: 140 - protein, 371 aa, Listeria monocytogenes
VTERKVSWLELFFDLIFVTAVASTTHLLLSVDNHPDKTAAYFGEYLLMVTPMFWAWVGQTMFFNRFGEKIKWPELYMLSQMFFLILMTASFDLTFSNTYYTFLIGYLGIRFITVIQYFVISKQLTGNAQKVALLLGSVFLLGVLTTATSVFFEGFARYLVMYLGIAVDIILPLFLAKTLRKVPVDFPHLAERFGLFVIITFGESIVAITTILVGHTLDLYTICYTLLGFLIICTLWASYFYSFEKIVDHHKVTHGQFLIYGHFFIIVSVMLLAVNLHLLFEGHLQRDVLLLLLFSSVAVFFISKQFVFAAHKKAEVSFSFWKDALLLLLLVGLFFVNLYINLPLFVSFVSIWICALVDLGLQFGTSRSVRM

SEQ ID NO: 141 - protein, 122 aa, Listeria monocytogenes
MRIFCGIMSIQAGFIGALAEILSPDSKKNNLFMIPEDLAASSGYLMSLAMVLAGILIICAYRNDFLIFMALILWLFGLIFGLIFTPSYSGFYFRPIVCLISFLMGLFIFTDYTRHQDTGEER

SEQ ID NO: 142 - protein, 123 aa, Listeria monocytogenes
MEVFAEYLAEIENPDHRARTQEVLTWVAETFPDLKPEIKWNTPMFTNNGTFIIGFSIAKQHMSVSPEVAGIERFEADIKEAGYSHTKGIFRITWAKSVDYDLLAKIIKFNIQDKANYTSFWRV

SEQ ID NO: 143 - protein, 638 aa, Listeria monocytogenes
VTEKTIRLTTAQALVKFLNQQYIEVDDEMAPFVDGIFTVFGHGNVVGIGQALEEDPGHLNVYQGKNEQGMAHAAIAYAKQKNRKRIYACSASAGPGSANLITAASTALANNLPVLFLPADTFATRQPDPVLQQLEHESSAAITTNDGFQAVSRYFDRVQRPEQLMSALIRAFEVMTNPASAGPATICIAQDTEGEAFDYPVEFFQKRIHYLNRQIPTKRELTEAARLIQASKTPVIIVGGGARYSDAREELIALSEQSNIPLVETHAGKSTVEFDFKNNLGGTGILGTLAANKAIRDADLVIGIGTRYTDFTTSSKTAFGPATKFININVSRMQTYKLDAFQVVGDAKATLAELAPLLKGYQTQFGDRIAVYKAEWLAERTRLQNTKFNREAFTPEIKDQFDQATLNEYADSLQTEFTQTEALITINDTVAPDSIVVCSAGSLPGDLQRLWNPAVPNTYHLEYGYSCMGYEINGALGAKMAAANNQEVYSIVGDGSFCMSHSELLTSLQYGKKINIMLFDNSGFGCINNLQMANGSDSFFCEFRDSDNQIMQVDYAKIAEGYGAKVYRANTKEDLISALEDAKKQTKTTLIDMKVLPKTMSEGYLNWWNVGVSEVSNKESIKQAYEEKQTNLKNARLY

SEQ ID NO: 144 - protein, 325 aa, Listeria monocytogenes
MNLKKHSERKFDLITVGRACIDLNAVEYNRPMEETMTFSKYVGGSPANIAIGTAKLGLKVGFIGKISDDQHGRFIEKYMRDLAINTDGMVKDTEGRKVGLAFTEIKSPDECSILMYRENVADLYLTPEEISEDYIKEARVLLISGTALAQSPSREAVLKAVSLARKNDVVVAFELDYRPYTWKNSEETAVYYSLVAEQADVIIGTRDEFDMMENQVGGKNEATKAYLFQHQAKIVVIKHGVEGSFAYTKAGETFQAQAYKTKVLKTFGAGDSYASAFLYGLFSDESIETALKYGSAAASIVVSKHSSSDAMPTADEIKALIAQAE

SEQ ID NO: 145 - protein, 273 aa, Listeria monocytogenes
MGKLLRKPLNERIAPGVTLVQDINQGNSPLSYVGFRLIELEEDAVYQETLDGLECCIVALTGKISVSEGDHVFSEIGTRANVFEKIPTDSVFISGGRAFQVKADAEKARVALCYSPADRNLPTTLIKASDNSIEQRGKYQNKRLVHNILPDVSEVASSLLVVEVYTDGGNFSSYPPHKHDHDNLPAESLLEESYYHEINPKQGFIFQRVYTDDRALDETMAVEHQNAVIVPEGYHPVGVPDGYDSYYLNVMAGPKRVWEFHNDPDHEWILERD

SEQ ID NO: 146 - protein, 488 aa, Listeria monocytogenes
MADVRKLKNYIDGEWVESKTDKYEDVINPATGEVLCQVPISTRAELDQAAVIAEQAFEKWSQVAVPRRARVLFGFQQLLIQHKEELARLITLENGKNLSEARGEVQRGIENVEFAAGAPTLMMGDSLASIATDVEAANYRYPVGVVGGIAPFNFPMMVPCWMFPMAIALGNSFILKPSERTPLLMEKLVELFSEAGLPKGVFNVVYGAHDVVNGILENEIIKAVSFVGSKPVGEYVYKTGSANLKRVQALTGAKNHTIVLNDADLEDTVTNVISAAFGSAGERCMACAVVTVEEGIADEFLEALRTAAQNVKIGNGLDDGVFLGPVIREENQKRTIAYIEKGIEEGAKLTVDGRETGLSEGHFVGPTILEDVTTDMTIWKDEIFAPVLSVIRVKNLQEAVRVANQSEFANGACIFTNNAKAIRYFREKIDAGMLGVNLGVPAPMAFFPFSGWKSSFYGTLHANGKDSVDFYTHKKVVTARYSLKGYEE

SEQ ID NO: 147 - protein, 253 aa, Listeria monocytogenes
MKVQRIQAIENLIHEKGSISLDDLCEQFNVSKNTVRRDIAKLLQKNTIQKVYGGVVSVYNNPEEIRPFENRDTENHLEKQLIGKAAADFIEENDLIFIDSGTTTSCLAAALPTDKEITIITNSLDVINFASEMDNVKLIVIGSTFKPSTKSFVGVENWGFFEKYNITKAFMAATALSTAHGVMNSDILEYEIKRHMMEKATAKFLLVDHTKVDKSALLTYGELAEFDWLVTSKDIAGGCLGYCEDVGVLVRLV

SEQ ID NO: 148 - protein, 128 aa, Listeria monocytogenes
MINELQKKIDEINYWDLLVLDIQSKYFGDEVYIYIEKDEEICWKLSFTSCYKVSYETDAKWRGDFKVRNTGPKSGYYAQDISLNRYAENEDFIECSFDASIMTMNIICKEIIVEEVSVIENSFFWKNY

SEQ ID NO: 149 - protein, 209 aa, Listeria monocytogenes
MNKFKILGEYKDWCEIYKDGTLIHNGSSLGIVSQVESELCLRLNYGTNKHFYSILKKCGDFILAVPKKVGFLKAEYKYEPIIFNKQEFDEFIDCIYVDEKLISSIPQLNKEDILNMWFLSNPLHKTYSNEMEMQENIINNILFFSDDEYDISCLKKVINKPDLSVHPIDSNYEVITIYMDGDAGMYEWKGIVIIDNNAYLKIDTHYYIN

SEQ ID NO: 150 - protein, 938 aa, Listeria monocytogenes
MKRIDRIYEFILENPSTKTIREQLEQNEGFTASTISETLSILRNNVSMELNELHRQGKIIKIVGRPVLYFPKKAVEDEIGRTLSDNELEFDSCEPLLKMLKPSIVERSPFDDLIGVNDSLKTPVEQAKAAVLYPPNGLHTMILGQTGVGKTLFANLMYRFSQHAKRLPADAPFIIFNCADYYNNPQLLMSHIFGHVKGAFTGAENDKGGLVEKAEGGILFLDEIHRLPPEGQEMIFYLMDSGTYNKLGETDRTRKSNVLIIGATTENPESSLLKTFMRRIPIIITLPSLEERTAFERVELLKYLLSSEAHRVNKPIRIEDEAAKALIGNTTYGNIGQLKSNIQLVCAQGFLNSFDKDEEILIDFKTLPINIKDGFFHFSNRRKELQAIAEYLEPYTTIFPELNNTLITSDEYEPNFNLYKIIEDKASILMDQGVEDDDIKKFIKMDIDIHLNSFYNKFKNTIHNRENILKIVNEEILNFAEGVELRIEHQLGKKLNERFLLAFSLHLTSFIKRIESNKPLKYTNIENVVNDQPEAYELSREIKDDIEATFHIRVPNMEVMYLTLLISSLLKEQENARVAVLVATHGNNTASSMVSVAKKLLGEGLVEGIDMPLDQSPKIVLDKLTERAKEMDMGRGLLLLVDMGSLTSFAPVISERTGIPVRSIDMVSTATVIEAVRKSNILDMELDSIYDSLKDFRGYGGYNSDDDTLDSNQKPHAIITICATGEGTAEKLQLFIENILDTITTDAIKVIPIGLHEMDTKLEQLQEENDILMAVGIQDPKIQIPFIPLERLFGIDGEEQLVSLVKQRNIIVKKGETGRIAKEIIEESLNEFLTYLNPKKTIEILSSFASVLEKKLGYKLDNTFKINLLIHVGCALERMVLNDGLIYREPKDMLETNIFKALEQTNKEVIYKMNLKLTNDELCYLYDILNEIQPEVLS

SEQ ID NO: 151 - protein, 144 aa, Listeria monocytogenes
MPVGIIIGTHGEAARELLKSTEMIIGKQDNVEFITFVPGENTDTLITKYKEKLDKLDTSEGVIFMVDLFGGSPYNASSQIALPEDNMDVVTGVNIPMLLETLSMRAASNQKDLVETALTAGSGGVKSLKQSLPKIETEVGEDDL

SEQ ID NO: 152 - protein, 161 aa, Listeria monocytogenes
MEIRLARIDDRLIHGQVATVWTKETQVERIIVISDDVAKDEVRKTLLTQVAPPGVKASVVDVQKGIRVYNNPKYATTPVMLLFTNPTDVLTLVEAGVNITTVNIGGMAFREGKHMITNAVSVDETDEAAFRKLDEKGIELEIRKVASDNKVKLIPLLDKDK

SEQ ID NO: 153 - protein, 213 aa, Listeria monocytogenes
MQQLKSKKKWLPALIVAVFVGIIVILAIMFGFFQRQEVFDKYEVAYEIDGKLYEVFPISATDIGVDKKSKDKNLYFRVNSYYNIDYLFRLAYKQYEINEPSTNKYYSGLIDYSVADNAYVTQKDVYITNNESYATYDFFDKNGKKIYTYNPEETSNDDYIVRIKPTILQGYEKSDIGSYDDYLNITALFKDKLGMDVNVRIDEDKEMVIFSIK

SEQ ID NO: 154 - protein, 270 aa, Listeria monocytogenes
MSAIQLILVFLVSCISGMGSILDEWQTHRPLIACTLIGLVLGDITTGIIIGGTLEMIALGWMNIGAAVAPDAALASIISTILVITGGQDISVGISLAIPLAALGQVLTILVRTITVAFQHMADKAGKEGNLRSLDWIHVTALLLQAMRIAIPAVIVAVTVGTSAVENLLNAIPDVIVNGLNVAGGFIVVVGYAMVINMMSAKYLMPFFFLGFVVAAFTQFNLVALGVLGLVAAIIYIQLNPKYQLKEAIQQYGGGGGGRSADDLDDDLDD

SEQ ID NO: 155 - protein, 292 aa, Listeria monocytogenes
MSEQITVNEKKITKSDLMGVFIRSNLFQGSWNFERMQSLGFCFSVIPVIKRLYPEKGPEREQAIKRHLEFFNTHPYMAAPILGVTTAMEEQKANGADIDDGAINGIKVGLMGPLAGVGDPIFWGTVRPVLAALGAGFATDGSIIGPILFFVLFNAIRLGFRYWGVFYGYTKGTDVVSDMSGGLLQKLTEGASILGLFVMGALVNKWTTIYVPLVAYTTEDSKTGKDVPTTVQSILDQLMPGLLALLLTFACMWILKKKVNALWLILGLFVVGILGYWSGILGLPPAGYSPLG

SEQ ID NO: 156 - protein, 115 aa, Listeria monocytogenes
MTEKDLEGLMLMHKRIIENLEEFSMPAKQQMEKLKGFVLTDELASDFSDIALQYAKILFDHGWLTKEQLDMFLIVDKKLEGMSNNEDFWSDEALETSIEWAECSKQGKAILKTFR

SEQ ID NO: 157 - protein, 155 aa, Listeria monocytogenes
MVWDATNIFLFAANILTVLYILYNDAVIPLWKGKTVLSVKLRSRGRWDGYIFVGIIVLLFVSNTFFREGPFSTSVLLGIMGVLFIYICFFRSSKAVFKESGLFYALLFFPYAKIERMNLSEDGVLVIETNRQRLMLFARSEKDLEKMLAVFTTYS

SEQ ID NO: 158 - protein, 115 aa, Listeria monocytogenes
MKKKWLLLILSVIVLCAIIFGIKWLLYRDNLVEMMQVDDTLYIVSYEPAKQEDALEKIGEIEHRIRHYRIPNKNFTSNYLSEGTELYKAKNGDEFPRTILFKEDGEYFIASEAMK

SEQ ID NO: 159 - protein, 127 aa, Listeria monocytogenes
VEIKVQKKLTDGRIAFSSEYGECVGIWADEDPEPSRVYTVEITIPDMISAELLHESEEKHCALEIDEEGLVHVIGKLEDYEEDGFAVLRLEESIICFDTKFSEEIEMLHGRFVEFVIPEIKLSNVGI

SEQ ID NO: 160 - protein, 288 aa, Listeria monocytogenes
MTILAFDLGGTAVKFGVLTTAGEILEKGKFKTPDTLEEMMQSLVDVKANYDYTFQGAAFSCPGAVNNETGIIGGASAIPYIHNFPFKQLLEEKLGLPVTMENDANCAALAEVWIGAAKDKQDIIFMILGTGVGGAVIRGGKVHHGANLHGGEFGYMLMDRDGHTLSELGTVVNAATRIAGRLEVPKASIDGLRAFELRAEGNKIAKEELDTMFYYLARSIFNLQYALDPELVVIGGGVSERADFIQELTEYVAKVKASVPIATISPTVVGCQFGNDANLIGATAFHLA

SEQ ID NO: 161 - protein, 110 aa, Listeria monocytogenes
MEEELEVIHKGLANAKNGFKAVPGKLYLTATYIVHKPNDYFDEEINIPLNRVAKIRGVRTKILGKELLSNILEIDMISGVKYQFVVNKQKKWLEAVSEVLESRGESEKLG

SEQ ID NO: 162 - protein, 106 aa, Listeria monocytogenes
MLLPSGPDMVHRFPLRKTQPSTPLVKGRPNNYDASNEEFNPARADCGLQGAATSPSSTTNLLPIIKCQIKNYLAQTLKRAQLLVYLFHLKSASGNTEIFFNVSKHS

SEQ ID NO: 163 - protein, 309 aa, Listeria monocytogenes
MGKALLIVNPSSGKEKGKTYQGKTEEVLKKRYDEVEVRLTEKAGDATEFASWAAEQGFEAVIAMGGDGTLNETINGLAIHEKRPDFGFIPLGTVNDLARSVGIPLKPEKAIQALEKAIAVPMDVGRIGDQYFMNVLAIGMIAQAVDQVSVEQKTKFGSVAYFLEGLKAFNRNELLHFKIEYDEEVWEGEAALVVAGLTKSVGGMESWAPDAKIDDGYLHIIILTKLGLLDAANMIPQLIRGNLKNSDGVVYIKTKKLTIDASGDDLSINVDGDPGPGVPAEIEVLGSHLNILAPKKSSKKRFGPFILKK

SEQ ID NO: 164 - protein, 329 aa, Listeria monocytogenes
MKSFQALFIEKEADNTSLHFRETTIDNLPENEVTIEVHYSGINYKDGLAVLPDGKIVSEYPFIPGIDASGVVVNSKSDQFQVGDEVIVTSYDFGVSYFGGYSEFIRVPAEWVVPLPDGLSLKEAMILGTAGFTAALSVDALEFSGVTPNAGKIAVSGATGGVGSLSSAILSKRGFSVVASSGKSDAKEFLEKFGVSEIVSREAFQPEKVRALDKQLYAGAIDCVGGKPLSYLLTAVQYGGAVTTCGMSAGGKLDTTVFPFILRGIQLFGIDSVLCPMSKRERIWNRLATDYKLTNLESLATEIAFSELPESLHQVMNGGVTGRYLVKVK

SEQ ID NO: 165 - protein, 215 aa, Listeria monocytogenes
MTTKRKETRESVCYREIKKKIRNGELKPGDRLIENTLSQQLEISRTPIRKAIGMLAADGYVEYNDFRGAFVRDSIINKERYFEMTEIIGLFLKQAIQKIRTKKITFNKMRVVAKLVEIEREEPTDPGIYFEYEKWFVSDLLTYMKNNYYLKISDDFFNNIQEFGDEEVIKIAQNACVKTVANIQRFIDALDEQDYDKCMAIIDQVIDAHVLVAYR

SEQ ID NO: 166 - protein, 250 aa, Listeria monocytogenes
MAIKKLNDFYFKKLGNWNLIHSFLKGFWRAFFFLLLLLLIADLIVMKFVNDRYFIPVILLSLLCIPLLYYILIYSRAKKFIRTRYQLRSFAELTTMRRYLLYAYLEKSGFSTRADLEKLIRFIHSEMAEEKKNYQPLSTVVGVFIAAFLAILGGTFLFLMDDVVERLIAAVLIMVMAILLFIVGTFIMSIIRSKSENNTKKERVLTKEIIAIQTAILVSENTSYHPFLAMERKIAENDFLKEIITSRSFL

SEQ ID NO: 167 - protein, 372 aa, Listeria monocytogenes
MKKLLYQKVYDQLKLSIQEGKIPVGSKMPAENELMAQFDVSSITLKKALELLKKDGYISRRPRVGTFVINASPVSEQIETRMFDKPLFGCIMTNFDDTFGTTLLSGMLEHSDSKAHIIVKKSLGDTEREEEILQEFIEMNVAGILILPASSKFVSPTLLELASQKFPLVVIDRTLEGLPISSISSDNTEAGRIITEKLFELGHKHIGMITSTSPVSTLDSRVNGFIRGHASFHTAFHSDYVFREIESVMPNSTVSIQTDIDKIAHFLNTHSEITALVATEYNIALLIKQACNKLGKSIPADLSVVCFDHPDNFFDTSAFQFTHIKQAQYEIGVKAVDMLLNQVLKPDTINKETLPPMLIEGDSVKMLKSTSK

SEQ ID NO: 168 - protein, 342 aa, Listeria monocytogenes
MKWSEYANLAQLSLEKFYLADTKEQFLNNFYPTENPEEDNKVFNYWWLAHLVEVRLDAYLRTKKQADLEIAENTYMHNKNRNGETLIHDFYDDMLWNALAAYRLYKETGKPIYLEDAQLVWQDLVDTGWNNIMGGGFAWRRPQMYYKNTPVNAPFIILSCWLYNELNETKYLEWAMKTYEWQTKVLVREDGFVEDGINRLEDGAIDYEWKFTYNQGVYIGANLELYRITKEAKYLDTANKTADTSLKELTEDGIFKDEGSGGDEGLFKGIFYRYFTDLIEETADKTYRDFVLNSCQILVESAKVDGYLLMGMNWKEKPSGKIPYSAELSGMIALEMAAKLER

SEQ ID NO: 169 - protein, 417 aa, Listeria monocytogenes
MKKVLLAILSMVLLLSLAACGGSSDSSKDKNGKEEIVMWGSWSGDQIKQLEKQIDSYNKSQDKYKVKYVMQENVEEKLLTGIAGGELPDIIMWDRYQTALYAPKGVLEPLDKLVKEDNLKMDDFYEESVKEMTYSDKLYGLPLLNDNRILFYNKKLLQEAGVKPPTTWDELATAAQKTTKWDGNKMTQAGMSLQDVGLFNLYLMQAGGELVTSDNKETAFNSEQGLEVLNYWDKMQNDLKVYQRGFDDGSDAFAAGKEAMTYNGPWALADYNKVEDLDYGVVEPPKGPNGDKGAIMGGFGLVMPKQAEHKDGAWDFMKWWTTKPENGVEFAKISGWLPANKIAAEDEYFTKDPNYSVFVNTMKYAKIRPTVAGYADVEGLAMKPQFEKFMNGNISAEKALSQAEKEGNQILKEERDK

SEQ ID NO: 170 - protein, 291 aa, Listeria monocytogenes
MNTIKLKKGSKSFIWYIAVLLISLVTVFPLIWTVSTSFKPTSEILSNSMNLIPKMFTWDNYKDVFSTTPFARYLVNSLILAVGGVLTNLFFGSLAGYAFAKLPFKGKKGLFMTFLGSMMIPAVVTMIPSFLVLKNFPLMGGNDITGHGGMGFINTYWAILIPGAAGAFSIFFMKQFFETLPDELSEAARIDGCSEFKIFWKIYMPLAKTALATLGIMTFQAGWNQFMWPLIVLNSQKMMTVQVGLASFQYNESANYGALMAGTIVSTIPVLFVFIFAQKYFVEGIAHSGGK

SEQ ID NO: 171 - protein, 296 aa, Listeria monocytogenes
MATIRNKSAQIHQQRMAYLFIALPVLLLAIFMILPIGMALFVSFTDYDIVNSPNWIGFDNYIKMFRDPYFLISLKNTIIYTALFVPLGLVASLGAAILINMNKKGAGLFRTFFYVPVLCSTVATATIWYWLLNPQYGLINRVLGWFGINGPAWLYDSNWAMFAIVMMSVWMTFGTNMMIFLAGLQGIPANLYEASKIEGASRWKTFRYVTWPSLSRTTFLVTTMLIINAFQVFDQAYVLTKGGPGNSTITLVYYIYNEGFGGLKMGYASAISFVLFLIILVFSIINMRVNKEDRTA

SEQ ID NO: 172 - protein, 432 aa, Listeria monocytogenes
LVIENRDFIQISTEKIKKEINNQKLVEMYKRCMENTLDTTIKIRDSGLTFILTGDIPAMWLRDSVCQVRPFLIFAKENEEIESMLIGLSKEQVSLVEIDPYANAFNETPNGAGHQADKTEMHPQVWERKYEIDSLCYPIQLAYLIWKITGRTEQFDAAFFKMLQTIFALWEVEQHHETKSPYRFERLDCVPSDTLKRNGLGTETAYTGMLWSGFRPSDDACEYGYLIPSNMFAVVVLGYAKEIIEAFYPSEIETIKQAATLQNDIQLGIEKFGTYNHPTFGEIFAFEVDGLGNQLLMDDANVPSLLSMPIIEYLEKESPIYQNTRKFILSKSNPYYFEGKLAKGIGSPHTPAGYIWPIGLAIQGLTASDKSEKLEILQMLLRTDAGTGLMHESFHPDYPEDFTREWFSWANMMFCELVLDVAGFRMANVLKN

SEQ ID NO: 173 - protein, 504 aa, Listeria monocytogenes
LTSKPYIMGVDIGTSSTKAVLFNQRGEVIFRQATHYELITDETGKAEESPTEIFDAVLTSIQAVMKNINTEELAGISFSSAMHSLIMVGSNGELLTECITWADGRSSETLEKVKRDNYLFQLYEATGTPIHPMSPFAKICWLKEEKPTLFKRTEKFVDIKSYILYRLFGVWVMDESLASGTGLYNIMEHDWEFEAMEIVKLTPDFLPKVVPETYQLAGVKKEYAELMGIPENLPFIIGGSDGALANIGIQATGQNDVTITVGTSGAVRKLTDQFQIDSRGRTFCYGAGDGYFIAGGAVNNGGKVVEWGLQQFGSEAEISRRDFASFIAKIEEVPPGAAGLLFQPYLLGERAPFWTNDIRGGFVGLTINHTKAHFIRAILEGVAFNLAEVYEAVSAPDDIIYVTGGISAHDAWCKLLADILNREIRVPHTIEGSSLGAAIIGMRSLGILKDLNLKHTLPIKAVYHPSENVLKYAELRLIFKQVTTQLMSSYSQLNSWQKKFDINS

SEQ ID NO: 174 - protein, 329 aa, Listeria monocytogenes
VIYLDNEDVLDQAYNFAMEEYALRSLDENETYFMFYRMKPTIIVGKNQNTLEEINHPFVKDHHIDVLRRLSGGGAVYNDEGNISFSMITKDDGNSFQNFAKFTEPVIRALRKLGVNAELSGRNDIEVNGKKISGNAQFATKGRLYSHGTLLFDVDLSMLEKALQVDPEKYLSKGVKSVRSRVTTIREHLAEDIDILTFKQILLESIFETKDIPRYTFTEADKQGIEKLRTERYRNWDWTYGKSPKATIKRKKRFPAGTIEFQVSLEKGQVKEATIYGDFFGTEDVAELAEKIIGCRFERKSIQNAWQEINAKDYFGGIEKEAILDMLFE

SEQ ID NO: 175 - protein, 290 aa, Listeria monocytogenes
MKKTGWGILGAVAAFTGYAYWSTKHLTVTNYEIVSDKIPAEWDGATFIQLSDLHSASFGLYNNPLLSIVNELAPDAVFLTGDMIDGDESPYVAMAVVRKLAKEFPVFYVSGNHEGRSAFYEDFKADMEKHHVAVLENERYFLKKDGAAIMVAGVQDPRFVKENWAEKELPKEEWEEAALKEALDDATANLSSDYFTILLAHRPEFWPLYQAYPIDLVLSGHAHGGQFRLPLTEGLFAPGQGFMPKWTAGIHRAGGKALVVSRGLGNVTKLPRLFNDPEVIRITLKAKGDA

SEQ ID NO: 176 - protein, 418 aa, Listeria monocytogenes
MEKKVLIVGISQKQKDFDYSMEELANLAAANNMEVVGEIRQNIDRENRATYVGKGKVDEIKGLAEMQDARLIIFNDELSPSQIRNLEEALELDVMDRTGLILAIFANRAKTKEAQLQVQIAKLQYELPRIFGQGEDMDQQSGKGGLSNRGSGEKKIETDRRTIKHQIRHLQKELDMLVDDREVRRRKRKKNEIPVVSLVGYTNAGKSTTMNGLVRAYSETADKQVFEKDMLFATLETSVREIVLPDNKQFLLTDTVGFVSKLPHQLVKAFRSTLEEARDADLLIHVVDYSDPHYKTMMKTTEETLKVVGVEDVPVIYAYNKADLLEDEMYPKQTGNTIIFSAREEESLEFLTEVIRKELFASYEKATFLIPFEAGQVVAYLNEHADILETEYLENGTQIVAEVSPADLQKLAEYQVAE

SEQ ID NO: 177 - protein, 206 aa, Listeria monocytogenes
MTIFKSADLSQKENYKFLTGSIIPRPIAFVTTLAEDGVTVNAAPFSFFNVVSSDPAIVSIAVQRADGEQKDTARNAAFTKELNIHIVSESFVEEMNKTAARLAPDVSEIEKTSLHLEQVPGMKTPKISEANIVLTSKLEQIIPIKNDAGEVVSDLILARILTYDFADEVFDSEHHYILPEKLAPVARLAGNDYTKLGDIFRIERPN

SEQ ID NO: 178 - protein, 202 aa, Listeria monocytogenes
MEHIYIPGKNKDLAPLLLLHGTGGDEKSLVEVAEFIAGDAAVLSLRGDIKEGGANRFFKRFHDGSLDLEDLESKTSELITTTRELAKKYQLDFERIIAVGYSNGANIAANALLQAENSFHKAILFHAMPAGNKQPEFSISHRSVFLSAGLNDPLITAKASEELVEILKQRGANVETVWTAAGHSLTMEELEEAKKWYQNNQK

SEQ ID NO: 179 - protein, 319 aa, Listeria monocytogenes
MIKDLKGIHHVTAMTSSAEKNYAFFTEVLGMRLVKKTVNQDDIHTYHLFFADDKGSAGTDMTFFDFPNLPKGRHGTDSISRVAFRVPSDAALEYWLDRFEQLEVPHSDIKTLFGKKYLTFQDFDDQQLQLISDENNEGVAPGTPWKNGPVPEKYAIYGLGPVFLTVVSLKNMDAILQTIFGFRKVTEEDGLHLYEVGEGGNGAQVIVEERTDIPAAMQGYGGVHHVAFRVEDHEELQKWIDRMNTIEAPNSGYVNRFYFESLYVPVSERILFEFATDGPGFASDEPYETLGEKLALPPFLEPKRAEIEKMVRPINTKRS

SEQ ID NO: 180 - protein, 295 aa, Listeria monocytogenes
MIKGIHHVSALTKSFSENHHFYSEILGLRLVKNTVNQDNIHMRHLFYGDYIGSPGTLLTFFEVPRIGSSYDERAFFGKMTLGIPTDTSSYWEKRLNDFAISFQKDGQTLTLQDPDTMGIILTEIPATNSNPTIHTNIPAEKQLVRIIGADYHVPDPAATSRFFTNLFELESQDGVLVDKSEMSFAKLHATTSDKKSRTGRGTIDHIAYTLETKEAVDELHDLAVRNDLKIEEFVDREYFKSLYIREPGGLRIEFASAGPGFTIDEPLETMGERLALPSFLEEKRTEIETYFGGDL

SEQ ID NO: 181 - protein, 326 aa, Listeria monocytogenes
LINLVYNEQLKLWRKKRLIVILALVAIIVAIFTYAQFRQHQEDEKQAGTSDWHVQTQQQIVDLENRLGTGRLPEEYQKYFKVLVGQLQYYLDHDINPNAPGAPTFLKTFVENGISLLFPLFIMVIAADLISAETSAGTMKFLLTRPVKRWRILTSKYVSMLLSISAIMVLSAVIAYLISGIVFGYGGWDAPVLTGFGMKDGAVTTTDVYQLPVWQLLLMEFGLAWFVSVVVGVLTMFVSVLVRSTAAVMGIMLASLITGTILTNLVSSWPSAKYLFMVNLQLTNYLNGSSPPVEGMTLSFSMLVLTAWMLVAFILSYFIFTKRDVY

SEQ ID NO: 182 - protein, 301 aa, Listeria monocytogenes
MTERALQVTNLHKKIRKREIIKGISFEVMPGEVFGFLGPNGAGKTTTIRMIVGLIKPTSGTILIGGKDIRKNFTEAMRGLGSIVENPEFYTFLTGQENLAYFARMDSSIKKERIQEVTELVGLEKRINDRVSTYSLGMRQRLGIAQALLSNPKLLILDEPTNGLDPSGIHEMRDFIRALARNEGISVLVSSHLLSEIELLCDRVAIMTDGTIIKTDQVAHLLSSRAQLRWRVTPIEQAKAFLESVTEVEVDGEYLVTAMNEESAEWNEQLVAKGIKVHEIDKRKPSLEDLFLELTGGQSID

SEQ ID NO: 183 - protein, 273 aa, Listeria monocytogenes
VKKSKTVQILLVFSVVALILSMVGVVSIWYGQKNHQTNNAKTTAKKETTVTKKQDTFKITALGDSLTYGVGDTEGGGYVRVVENFYKQKEKNVENVNLAISGAKSDQLLKQLDQKEVQNQIKSADVILMTIGGNDLFRGGEALDDFKSDAIKQAEASYTSNLKQIYQTIRNLNPSAPVFHIGLYNPFMSLENASEMSAVANEWNMQSQNLSQNEKNIIYVPTFDLFQQNGDAYLATDKFHPNHAGYQFIGNRVAEVIETGGGEGDDGASTSSN

SEQ ID NO: 184 - protein, 203 aa, Listeria monocytogenes
MLLTRNEPFTAEKIQAKADILELVQFERFCRDNALWDAMETCFTKDSNVKISWFQGTGHGFIEASKKMTNPAPHKIYNTQVWIKNDRAVAIMQATIQTRTIINGVEMELNSDAKLVTRVERIDGKWYINAFEGVYEKDSLMPVVPSKNADVPAELLANFRKSYACLALSLTLNGYEIDNNLPGIDRPEQVTQFFKEADEWLLQ

SEQ ID NO: 185 - protein, 226 aa, Listeria monocytogenes
MNIRTELQNSQLCEGITEAQLTELMNKITVKEKHYKNNEILFYTDEVTKVYILVKGNAAIAKNTSSGKRILGKNVTEPGELAGEIYYFSHRNPFWDYAIVLEPTTVLEISGIDQGTLQTLDLALQNQLLVNLLKSVTRKFEYIGEKVRMVSEDSVRAKISNYLFGIQDDDGSIELTETREEIADYLDITRPSLSRELGRMQKENIIRIEGSSVIILDAIIFDTFIE

SEQ ID NO: 186 - protein, 278 aa, Listeria monocytogenes
MSVLNIEGAKLSYQKVGQGPILIFIPGANGTGDIFLPLAEQLKTSFSVVMVDRRGYGDSELTAAIPERASHAYDDYRVTRDAADIAALAKALSDVPVYILGSSSGSIVAMHVLKNHPEVVKKIAFHEPPINTFLPDSEMWQEANEKIVQTALTKNMAEAMQLFGETLHIAPIDAESMSKPAVTIDEVTKDSTTQQMKYWFTYEIRQYTSSNISLDDFKPYVHQITLLNGTDSKGSFPQDVNAFIAKQLGLTIVDIPGGHLGYIQKPAGFAKVLLSIWG

SEQ ID NO: 187 - protein, 98 aa, Listeria monocytogenes
LDIAKWFDNAELYSISQVLKENAARFEDDCIGIIFPCYNFAASRMVCEFIERIQLVSQYIFVIVTYSNTAPMCASTELYEHFLMSTYHLVGVFWKINP

SEQ ID NO: 188 - protein, 171 aa, Listeria monocytogenes
MFKNLFKKPKMKDEMLEMKQNQYGARAFNMMIIIVAIVILIKAVVLEASISELWVELLLLIVGGGYYFYSVLKNNVPFMPTISLKQTIRLVFLISAIFGISVGIRNVFFLYADNMSGTELSYQMMMFFFISLFTAIGSGVIFGALAYCLYQLSKWQEKNIMKKIEVENAED

SEQ ID NO: 189 - protein, 95 aa, Listeria monocytogenes
MEMNASFIGLYAITVYYLYGYLEKRERLEWLLLLPVLMALTITITNTNAYYENIVTNPLEQNIVSFIASFIILAVCLTIPVSIVLFFRKRKGEVQ

SEQ ID NO: 190 - protein, 113 aa, Listeria monocytogenes
MYQSLSNIIINLQANKDLLLQQDNEVDRIKSILPLVVARNSIIETLGRNPVWGISLTDDVNNLKIDNQLVTEVIPFDWNNETLYLCYFSDLESSNSPSEMGISFQLVNIFSLS

SEQ ID NO: 191 - protein, 99 aa, Listeria monocytogenes
MKYCCISIIIIICYYFTNEKTKLDFGISTTTIVEEVKKNREDYSTLLNKLAEKELKGITTLRNFRLLVSSIFLIIVILLIAITYLAKKRQRITEDFIAN

SEQ ID NO: 192 - protein, 167 aa, Listeria monocytogenes
MKKPLKISLIVVGIAVVIFAGVMLSYRFVKSMDVTENAEINKSATGDHVLLATQGSKFKDSVMDQVKKDMEGKNVHVSIIDTTKLDKVKADDYDKVVLFTTVQSDDIPENVSTFMNDNKDKSIHIAVTADSGRWDDKPKDIDAISEASKAENKQDFVDDLTKAIVAE

SEQ ID NO: 193 - protein, 666 aa, Listeria monocytogenes
MLEVKHLKKSYKLGKKNETPVLKDINVTIQDGEFAAIIGKSGSGKSTLLNIISGLDTDYEGKVLYNGEDLQDIDLDAYHFNHIGFIFQSFHLVNHMSVVENVKVPLYLNPELSESDRNARALDLLKQVGLEDFASKKPTQLSGGQKQRVAIARSLANNPDMIIADEPTGALDSVTSDEIIKLLKALAAKGTTVIVVTHDLNIADQTDAVLRLADGEVISFERKKEVVQKVTHKNEKKLRLNWWATAKISFKSFFNRKFRNLLVALGTSIGIIAILLAFGLGNGVNQSLSKIFGTTFSPNQITTYYKEDGGSKSPEPTTPLTSSEIKKIKQLYEDENITEIYERTTVQGIKFEYDGEYLKGISGEMQEANFKPSRYEDLTVKDEYLLSGKMVTSDETGAVIPSSVAKAILGKKDSDELTKSDGDKLIGKKITLVYAGRNSDTKNTVKTETTISGITNPSKEGFARGFDVSTKTMNDFIKTTGIEKPILSVDAFTKTTAEAEEIVEKYEDNKDWANYSITNANAFVDTFSQFTDIIVYLIAFIAGLSLAVAGVMIAIVLYIGVVERTREIGVFRAIGYRKRHIRGLFMMEASYIIILANVLSSLVAVTIAKIASPILETKIGFEDMIHISFWNFLVTLAITITIGFIFSIYPSNKAAKLDAAEALRSE

SEQ ID NO: 194 - protein, 234 aa, Listeria monocytogenes
MTKMITFYLKQISPILLIGLAIILGLNFLGFTMNLLEGTDLLFRAIRGTTVISLILVLITTWKITKLDTSKENVTLASLSRFSETKKFFGKLFAAYLSAITVILLQSAFIWYYGFETGRIEAGDALSFVSGTLMMFLFIAMFVCYFVIPVGWLKDHVKASSLQKAAVILLLFAILIVNLLAEYYLHIYNSAGIISILPNGHFDISLLSIIWNVGLCSVIAGSYIYMKSKKMDTI

SEQ ID NO: 195 - protein, 229 aa, Listeria monocytogenes
MLVGNNIAKSYPNKLVLQNVDFEAKSGDMIVLTGENGSGKTTLLDMLASLKKPDSGTLELDNELFTTNDIRQQIAYLNNELYAKKSTTIEDFMKQHGLLFENIELDKWDRLLAGWRINKRLKLGELSTGMLMKVKIGSVLARKAKLYLYDEPFASIDIMARSEVMKAIISETNPDAITIISSHHLEGTEKLYSKLWLIKDNTLQTIETETYREETGNALIDFYKEEMNK

SEQ ID NO: 196 - protein, 125 aa, Listeria monocytogenes
MKFDDSKPIYKQIVHYIHTEIVTGTYEAGDKLLSVRELATKLEVNPTTIQRAYAELEETEIIYTVRGTGKYLTEDKRRIEQLENDIAKQLTENFISEMSKLGINKEKIIAWVKKVEEVEVNVSGK

SEQ ID NO: 197 - protein, 219 aa, Listeria monocytogenes
MPEKLDTVLGYLKEFPDYYKYVTKKTYTLNEKIIFEDEKAKSIFFIVEGYAAVELEDNLRKTNYISIFVLPYNVLGIDAFSSYPKKKHSITVMSESLMLYKIDADFLLNILSIKPDVNDFLLTSIADVFARHYALLGMIAKTPKERIYMALENLAVEMGTEDEERNEIVLPNFINQSVLARYCRTTQPNISNLLTELVEEEFLINKKSPYRIDKDSLDI

SEQ ID NO: 198 - protein, 457 aa, Listeria monocytogenes
MFNLQKGFPENFKWGSSTNAQQFEGGYKEGGKGLSIADVRVIPDMPDESDFESFKTASDHYHHYKEDIAYYGEMGFQIYRFTMAWSRIFPNGDETEPNDAGVEFYSNMLAELEKYNIEPVVTLYAYDMPLQLLEKYNGWLDRAIIKDYLHYVETVVKLFKGRVKYWVPFNEQNFISIDSEYMSGYRAKNKAEVFQIQHHFNLCYAEATKLVHQIDPDAKVGGNIGNICPYPMTCKPEDVEASDKVAQQLGYAYGDIYFRGYYPKYFLKEYEGVDFEQIILDDDLTIIKSSEPDFMSLTYYMSSAIEAKGEEEVVVMNGIKAPNPYCETTEWGWTIDPYGFKHYLQEFYHRYQLPILILENGMGARDEKNTDDTIDDTYRIDYLASHIARMQEAVEEGCEIIGYLTWSATDLYSTREGFEKRYGFVYVDKDNSYKRLKKKSFYWYKKVIETNGNDLNY

SEQ ID NO: 199 - protein, 312 aa, Listeria monocytogenes
MKKLLSGLIVVLMVSLLGHSFNAEAASYEKIIYDKAVNLKGVVNQSKRNDGINSKMYKTSSSVKYLGSAKKYDKKTLIITREGKTARAKWYYCKLGNTTIGWIDSRAFTNIGKPTIADAVPALWNSKKAIITTKPKSTTATTYFFQKNSAGNWYEVRHFTSHIGKWGFDPKFSEKSSGTPVGVYRTGIAFGQKGNPGTKLTFRAITNRSYWISNSNDKAYNTWQERNSSSSADEKMKIPQYKYGMEVKYNAKRVKGKGSAVFYHVDSPKYNYTLGCVAQSEANTKEVLKFADKNTLIVLGEESRIKTFYGIN

SEQ ID NO: 200 - protein, 617 aa, Listeria monocytogenes
MDYQKLAKEILANVGGEENVRSVVHCATRLRFKLVNKEKADKKQIESISGVISVVENAGQLQVIIGNTVGDVYKALGSFTKLTDDGDSEIAKGTKDSDGNFLSKAIDVISGIFTPILGALAGGGMLKGLLMILTTFGWLTESSGTYQILYAAADSVFYFLPLILAYTAARKFGANPPVAIAAAGALVYPTMINLFNEGAHITFLQIPVVLMSYSFSVIPIILAVWFLSILERFLNSKIHEAAKTFLTPMICLMLIVPLTFLAFGPLGTFISQGLASGYTFIYNLSPIVAGAFMGAFWQVLVIFGIHWGFVPIMINNLSRYGRDTMIAMVGPSNFAQAGASLGVFLKTKKPEVKAIAGSAALTGFFGITEPSIYGVTLKYKKPFVIASIAGAIGGAIVGAAGSSGAANAIPGILTLPIFIGKGFVGFILGIAVAYILSAIGTYFFGYKDEMADGIAPTTKEAKETGVEAEVIVSPIRGNIVPLNEVKDEAFSAGLLGKGVAIVPQEGKLISPVNGTIETAFPTGHAIGIRSDKGVEILLHVGFDTVQLNGKYFKLLVAQGDRVLVGQALLEFDLEAIKADGYDITTPIVVTNTDAYLDVLISDQKTVNYEDTLLTPVL

SEQ ID NO: 201 - protein, 310 aa, Listeria monocytogenes
MEQEVTRLISASKQDFEKMNGRDLKRSIFQSEGRVIMAQHLLFASQGLVRGVTNTELLAAFGSDMIMLNTFNLEDEKSNLGLQGLTLEDLKKRVNIPLGIYLGCPGENKTSENIIYDAAGMLATDEHLLRAKEIGADFIVLGGNPGSGTSIQDIIETTKRARKLLGNDVLIFAGKWEDGIDEKVLGDPLAKQDAKEVIKQLIDAGADVIDLPAPGSRHGISVRMIQELVQFIHLYKPGTLAMTFLNSSVEGADQDTIRLIALMMKETGADIHAIGDGGFSGCTTPENVMQLSISLKGKPYTYFRMASRNR

SEQ ID NO: 202 - protein, 148 aa, Listeria monocytogenes
MKIAIGNDHVGIELKPVIVAYLQDLGHEVDDFGAFSNERTDYPEYGKKVAESVAAGKSDLGILICGSGVGISIAANKVNGIRAVVCSEPYSAKLSREHNNTNILAFGSRVVGAELAKMIVQNWLDAEFEGGRHAKRVEMIARIEDEND

SEQ ID NO: 203 - protein, 223 aa, Listeria monocytogenes
MSKKLICPSMMCADFSGLEREVEELDKAGSDVFHVDIMDGAFVPSFGMGLQDFEEIRQKTQKLVDVHLMIMNPGDYVEMFADKGADIIYIHPEADLHPARTLDKIRNKGKKVGIAINPGTAIATIKELLPLVDNVMVMTVNPGFAGQKYLDYVDVKIAELVELKKDYTFEIMVDGAISPEKISKLSQLGVKGFVLGTSALFGKKESYAEIIKKLKQEKMEELR

SEQ ID NO: 204 - protein, 334 aa, Listeria monocytogenes
MKKTSIKDIAKLSGVSVATVSRVINDNGRFSEETREKVLAVIKETNYQMNFSAKSLRMNKSFSVGILVPDISNYFFSSVVQQIEAILFDQGYSTIICNTGRNLDKEMAYLNMLESKMVDGLIVISGADEFGFKYTNAENGIPYVCIDRQPKDKKDTIFISSNHYQGAFEATEALIHAGVKSPVIFMHSRQSSSAKERLKGFQDALKKNNIRYDPDVSKFTVDLQIHDYQKSIITFVNEVTTMDGIFAINDNIALELLNLLPTIGKKIPNDIKVIGFDDTPQCNYTVPKLSSVKQNIPKIAQITVDNLITIIKNPKQKKRITEIVPVELSLKDSI

SEQ ID NO: 205 - protein, 169 aa, Listeria monocytogenes
MLNENIKAIRKSKGLSQEEIAIKLNVVRQTISKWEQGLSVPDSDMLISISEVLETPVSTLLGETVMVSKVDDVKAISEKLEIINLQFAQRKTARRKMLYWLFVSLCAVIAIISAVFIILNSPYLGWDYSDPETSVIGVAFHTFEWLFVRLAPIILIGGVVGIFLTRKNV

SEQ ID NO: 206 - protein, 134 aa, Listeria monocytogenes
MNPRKSEFVLTLIAGITGIIAGITGIAGGGLLAALSGSEELSNATAMTAADSEALAAAGGLTVIFSIIALVLGIALIVFAVLIKRNAKVFGILTLVAGVVGFFLVGLLWIVPGVLAVIAGIMCLARKVPTDTFS

SEQ ID NO: 207 - protein, 112 aa, Listeria monocytogenes
MNKDNRKELIRAYKEKSPDAGVYRFISTKSGKSLIDNTMDLKGIANKLAFGVKIGAGNMLPPEMAKEAKEHGIDTIQFEILEKVDIKPEMTKEDIKEENDVLLSLWLEREDI

SEQ ID NO: 208 - protein, 159 aa, Listeria monocytogenes
MKIPTTLKHKPVIVVENYEEVDGKNAYHSDAKGLSLGLAQWNDRGKVDISAKVWRHTGDKWSRQSEELPLHRVLDLAILIARTKVHFKDAYRLPHFYDKENPTLDRIGLQGDALTIAVCEDNEYIDEDMQLFEQALKNDDELLSERLKTLSKLLQEAGY

SEQ ID NO: 209 - protein, 199 aa, Listeria monocytogenes
MTNTFLDSIKVRRSIYALDKNVSVEDSKIEEIIKDAVKYSPSSFNSQSSRAVILLGENHDKLWSIVEDTLRAIVPAENFAATEEKVGSFRAGYGTVLFFEDTAVIEGLQENFALYADNFPVWSEQSSGIAQHSVWVALANAGIGASLQHYNPLIDDAVKAEWNIPASWNLRAQMPFGNIVQEAGEKEFIDDADRFRVFK

SEQ ID NO: 210 - protein, 106 aa, Listeria monocytogenes
MAIIFAKEDDLEEIISSHPKILLNFWAEWCAPCRCFWPTLEQFAEMEEGNVQVVKINVDKQRALAQKFDVKGIPNSLVLVDGEIKGAIAGIVSCDELRSRFKSLAK

SEQ ID NO: 211 - protein, 220 aa, Listeria monocytogenes
MTTALKGVVFDLDGVITDTAHYHYLAWKKTAESIGIEFDEAFNENLKGVSRIDSLLLILRKDGRENDFTEEQIEALAADKNDFYVSLLKEITPADVLPGIKELIVDLKKQNLKCAIASVSKNARTVLSALEMEQEFDYIVDAAKITKSKPDPEIFVEACRGLGLETSEVVGIEDAQAGIEAINAAGIVSVGVGSGLRDADMTVKSTGLLDLRILEILHSK

SEQ ID NO: 212 - protein, 119 aa, Listeria monocytogenes
MPSIRYIVKTDVAETFEIIKAGQVGSNIVFSEVRTFDFGELATLACEKFYFRSSNRAALFVTINNFHGETEVTIISTGSSNGFFTGIDWGAAFDYMHSVVADLKRVAIREVAIEKQEEI

SEQ ID NO: 213 - protein, 373 aa, Listeria monocytogenes
MKIVIAPDSFKESLTAHEVAEYIKEGFQEIYPDADYHLLPVSDGGEGTLEILSKALDAKKMKIDVSGPFSEPVSAQVAFTEGNKKALIEMAEVCGLHLVPTTRRDPLQVSTKGVGELILHAMKKGATEIIIGIGGSASNDGGIGMASALGYEFLDAENNIVNPIGVNLADIATIRSEKVPAELENITVNIVTDVENPLCGEAGASYVFGPQKGLATTDLATADEAMRHFYQLANPAMVTMPRAGAGGGIGAGLVTFAKANLLSGIDFVIEALQIKTICEDADLVIVGEGKMDGQTAQGKAPVGVAKVVPKETPVFAICGSVGEGLEAVYEVGISAVFPSIAKPASLESILKETPNNLRRTARNVAAVWKGRVE

SEQ ID NO: 214 - protein, 725 aa, Listeria monocytogenes
MRKIIEKEFSLNYLNKYGSQMTVGNGYLGVRGALEEEYPEQVRGMYVAGIYNRPSGSMSSELVNLPDVTRFQVLLDGETFSMQAGKIHAYERYLDMHTGELVRKITWESSAGKKYQLNFYRFVSKATKHVIAAKVEIMPLSGGAKVKVKTGIDAQQTNFGTQQLAESSLRIFDEKLMVGEYETIESKQHITIATKVNKKGIFTAKNRQLMTEVEQEIAENQLFTLEKISMVKTSLDQVDAELPNTTYAELKRASETLWADFWEHAGVRVESTNDFDQFALDFACYHLEIMTPKDDFRCSVGAKGLTGEGYKGHVFWDTEIFIMPFFLYNKPEIAKQLLKYRYLHLKEAKEKATKNGYNGALFPWESAFSGDEETPEFAAINIRTGTRQKVASAISEHHLVADIAYAVCEYEAATKDAQFMKECGSELLLETAEFWLSRATNRNGRLEILDVIGPDEYTEHIDNNTYTNYMAHYNVEKALAWNKDNADFVARAEAFLEKIYLPVANESGLIPQDDTFLEKDWINLDKYKAAQGTQGILLDYSRQEVNELQILKQADLVMLFYLFPKMFAPDAVKQNLDYYEKRTIHDSSLSKAIHAIVENRTGNRAQAYQFFQEACLIDLGSEPHSSDDGLHAASLGAIWLAVVFGFVGIDTSGELLEIAPNLPGEWQSVVFEFSWKGEKILVEIAPNTLQLSKSTKSVLELVIYGEKHQLTDTITIKLDQKDVSL

SEQ ID NO: 215 - protein, 343 aa, Listeria monocytogenes
MKKRVAIIGAGQVAEKVHAAYYKTRNELELVAVCDPSLERGEEFRANNGFEKHYATAEEMFAAEKIDIVSICTPNRFHFDNVMLSLANGAAVMCEKPPAMSAAEAKAMWELAEEKGAILSYDFHHRFSSEAQFLKRNSALLGEIYCVKATALRRSGVPGWGTFTNKEMQGGGPLIDMGIHMLDAAMFVLGFPKVKKVTAKSFQKIGTKKSAGTFGSWDPEKYTVEDSLFGFIELENGGLIELDTSFALHIKPESALNVDFFGDLAGGSLYPAEIYTDNAGEFQLLEKLGQLDENKHENSMKAFVDSVLGAGKVELAGAKQGYIIQKIVESLYESAEKGESVSL

SEQ ID NO: 216 - protein, 264 aa, Listeria monocytogenes
MKLGTQNQAFFPENIEEKFAYVKEMGFEGFEIDGKLLVENLDEVKKAIEKTGLPVSTACGGYDGWIGDFIEERRLNGLEEIKAILEALAEVGGQGIVVPAAWGMFTYRLPPMASPRSQAGDFKAVSESLVYLDKIAGETGTKVYLEPLNRYQDHMINLLSDAQKYIDENNLKNVEIIADFYHMNIEEDSIPAALETYKDSIGHIHVADNHRYQPGSGSLDFKTSFDQLKKNGYNGFLTFECRVRSENPEQAYKDALAHLKSCLI

SEQ ID NO: 217 - protein, 350 aa, Listeria monocytogenes
MKKLVATAPRVAVLVEYNDREVLEDEVKIKVQFASPKHGTEVVDFRGISPFIDEEFSPEWNLFVSRETNSARGIVFGEFQLGNMVVGEVVERGSKVTEYALGDIVCSYGPIMETVIVKAVDNYKLRKLPKGANWKNAVCYDPAQFAMSGVRDAHVRAGDYVVVVGLGAIGQIAIQLAKKAGASVVIGVDPLSHRREIAEKHGADATFDPITTDVGLEVKRLTGKLGADSIIETSGNAAALQAALRGIAYGGTISYVAFAKPFPEGFNLGREAHFNNAKIVFSRAASEPNPDYPRWDRKRIEETCWELLMNGYLDCSDIIDPVVPFADSAESYMKYVDQQPDLSIKMGITL

SEQ ID NO: 218 - protein, 283 aa, Listeria monocytogenes
MAVSSKKSKRTKKIAFYTTMVVFLCMTLFPFAIMLMTSFKSSKEAISTNPTFFPKEFTFQHYIDIFNPDIFPFLTYFKNSLVVSVFAAGIAVVLGILGAYALSKLRFKGRMTINASFYTVYMFSGILLIVPLFKIISSLGLYDTETALIITMVVQTLPTAVFMLKSYFDTIPTDIEEAAMMDGLNRFQIILRIIVPLAISGIVSVFVYCFMVAWNDYLFASIFLSSSEKFTLPIGLNTLFSTPDYIWGRMMAASLVTALPVVIMYAISERFIKGNLTDGGVKG

SEQ ID NO: 219 - protein, 293 aa, Listeria monocytogenes
MKTKVYKRSDFKLAMILLAPSFVLLAALVLYPMISNIQISFLDMPLNPNIKSVFIGLQNYIDILKDPEFYKSLGLTVAYTALVVVGSTGMGLLVAIFFNREFRFRRTARSLIILSYVTPSISLIFAWKYMFNNGYGVINFMTVDVLHMFKEAPLWFDNPVSSFFLVTFFAIWRYFPYAFISFLAILQTVDKSLYEAADMDGANIWDKFKIVTLPAIMPVLATVITLRAIWMFYMFTDVYLLTNKVNILGVYLYKTAFAFNDLGKAAAISVILFVIIFVVIIFARKRVDLNGGK

SEQ ID NO: 220 - protein, 430 aa, Listeria monocytogenes
MKKKSLVLLVVVLVLSAVLAACGGKESGSKEVTIEFMHSSVEKERLDVINKLIADFEKENPTIKIKQIPVEEDAFNTKVVTLARSGKLPAVMEVSQDFAKVMDKDELIDQDAVKEVIDSVGEDKYYEGATNLVRSEDGKSYIAAPLSGWVQGIWYNKKALADAGFEEPKNWADIEKVAKKFTNKADKKYGIAIPTAESTMSEQAFSQFALSNKANVLDAKGNVTIDTPEMKEALQYYKDLSAYTMPGSNDVTEIKDAFMNGTVPMAMYSTYILPSVYEEGDPKNIGFAIPEEKEKAVYGTVSGLTISAGLDDEQKKATKKFVEYLSQPENMATWVLMSPGGAQPVNKEVVEQKAYKENEVIKSFGDLPNEIAASFNDIQVFGLVDGKNLTKMGDITSSGIIAQMVNNVTVGGGDVSADLKAAQKKAEEGK

SEQ ID NO: 221 - protein, 413 aa, Listeria monocytogenes
VEMDPNTDLSSVTRPRATPVLTTFQFDSGKVGHIWTTFSEDQIDLNFACPEVLYKMIDVLMFYLEEGAEYVRLDAVGFMWKVPGTSSIHLEETHEIVKLFRDLVDIAAPGTIIITETNVPHVDNISYFGNGEKEAHMVYQFPLPPLVLHAIHHGNAKFLRNWAKNLELPEGKRTFFNFLASHDGIGLNPVRGIIPEAEILALVNDLEEEGALVSYKQNPDGSKSPYEINVTYMDALSKQADTDDLRLARFLVAHAVLMSIPGVPAVYVQSILGSRNDYLGVEATSHNRSINRKKYDLAEITAELEQRGSLRKATYDALTKLISTRKAESLFHPEIPMEVLESTAELFVVKRSSDAESIILIHNLSEKEVSYSLDSGVYTNLYKGSTVTGSDSIKLSGYEFCWLKTKNYREEQK

SEQ ID NO: 222 - protein, 140 aa, Listeria monocytogenes
MTNLRKRLSRLYAEDVVDSLAARIEARVQQTQQRKLTRKDQWDEKDIVLITYGDQFKEESQKTLTTFKKMYDSYLKSAFEIVHFLPFYPYSSDDGFSVIDYKAVNPELGDWKDIKEMEKSARLMFDFVCNHMSAKSDWFK

SEQ ID NO: 223 - protein, 341 aa, Listeria monocytogenes
LASTIYDIAKHAGVSKSTVSRVLNNQANISEESRKKVLAAIDQLNYQPSKLARALTSSGFDAIMVISNRSTTTTTGNPFFSEIIQSISTQAELENFDLILQTAKNSEDELKKCLSKIQEKMIKGIIMLSSPADEDFFHQLDPYNIPIVVTGKVEGHYKNIYSVDTDNFGDSYALTKHLIKQGHQKIACIHAPLDYHVSIDRLAGFRSCLFDHQLDLRNDWIIDSGYSIEDSYKAALRLMEGPDKPTAVFATDDLKVLSIYKMAADKNLQIPTDFSVIGYNDKVASSFLSPPLTSIDIPINKLGKKATNLLFRLIHQDKNVPKTTIIQTEMIERESIQKINA

SEQ ID NO: 224 - protein, 664 aa, Listeria monocytogenes
MTKEYYFIKPELSSPETKQENIDSWLKTQDKTFYDAQIAQERDYCFWCNIVETAKPNSRTSYTSMAYTLNEPNMLNSAGKTSFILSEEEVLYIHTLSVVRDGKVIDKLDDINVKVLDYVRDENQASFNDEKKVTVLIRDLHLNDIFIVETTIERKYEESSIRNDFFRWIYSAPNSYWAYGKYRFELKNETEKKLEANFHYFRDEAGTILEKDKVMVEHNESYTIEKEDYIGEDAKELEITPFVDFVTEQTYPQITKTISDIYQKFYQVNLAEFAADIVTELDELPTLDHKIKHAIDFVQKEVYYLYNETEMDGHEPQAAEVTYKTKQGDCKAKTVLLKVILDYLGVNSELILVNYGSDVFLPVYTPSPFNFNHAILKITHNNQVYFIDATMSSDQGFLANRQKNSFMYYLEIKPGAELQKQEPFQDEIPSVEEVVYCDVKDNAAEITFERKLRDGMANGSREMFKNDSNKDIINRYNFAIYSNMTLYKKYEENEVDSHFSNTSIQIVEDNKDLNELSIIYKATISDPYIVENKKRYLHFWNWNNFIDDGAEKHFHKDFPYWIDRNVIKTELHLTTDKSIDQQERYTRQECDIKSKYLNHRMTKKIHKNGASCYLEYRPYHNLTIKEKDLEEYVEANKEILKSNWGIGIDIIEDGLFKKLGKLFK

SEQ ID NO: 225 - protein, 252 aa, Listeria monocytogenes
MEQIQSVKNDRVKTWKKLQTRKGRDKTGTYLVEGFHLVEEALRQDGLVLELLVSSGVSVPEEWLKGDYDVFEISTEISHLISETMTEQGVFAVVATSEPDMMLLYGKKLLLVDAVQDPGNVGTLIRTADAAGYDCVVLGKGSADLYNPKVIRSTQGSHFHIPVIQADLFDWIANLEEEGVPVIGAVLDDQAKSLNDMTKRDTLALMVGNEGNGISPELQDRLSEKVYIPIYGDSESLNVAVAAGILLYGLRK

SEQ ID NO: 226 - protein, 179 aa, Listeria monocytogenes
MENRKQMIKTERLFLSEMTLADTEILFGYWSDDSVTRYMNIEPFQSLQPVEEMIRMLRQLEIEGKALRCVIILQATEEIIGTCGFNYIDHENHRAEIAYDLGTRFWKRGYATEAVRALMEWGKESFELHRIEAKVDPRNSASIALLEKLGFSEEGLLRDYEKIGETYQDVQLFSWIDEI

SEQ ID NO: 227 - protein, 470 aa, Listeria monocytogenes
MEQTNKRNTLALISIMLGAFISLLDTTIVNVALPDITTALHATSETIEWVISGYALAFGLVLILAGRLGDKFGRKNIYIIGITLFLIMSVTAGFADSENSLIISRVIQGLAAGLFFPQINATIMDMYSGKSLGKIFGILGSVIGVGTAIGPLTGGLLIELFGATNGWRAVFFVNVPFVLVTLVLAMLYLPKRTVSTKKISFDLPGVGLLTIALLLLLFPLISNGANDFKPVDYFLMALSIPLFIILYKWSVYQEKKGNQPLIAPNLLKNNQFVSGMLLSLVYFAAFTSIFFVLSLTWQTGFNRSAILSGLAISPFALGSVLAASNSYRLIPLLGRKLLMLGVTLVIVGLGTVSIVFHLNDGAFSAWLLFLPLFIAGIGSGLTIAPLNSFTLSTVTGIDRGGASGMFNTAQRIGSSFGIAVVGSVFFRTLGNTAATSKASAFSDSLQMSMYVNIVLLVVCFLLVFRLPKNI

SEQ ID NO: 228 - protein, 104 aa, Listeria monocytogenes
MERVASIMYLYPGNKEEYKKRHDELWPEMKEALKAHGAANYSIFLDEKTDTLFAYVEVEDKAIYDKIAETEICQKWWKYMAPIMKSNPNNSPVAVDLKEVFYLA

SEQ ID NO: 229 - protein, 273 aa, Listeria monocytogenes
MTKDIMDAVFIKEMAKTTSNLYRLGWDERNGGNITYLLDEKEVAEYLDVKQIIRTIPMDFDGKKLAGKYFLVTGSGKYFKNVEEAPAVNLGVIQVSEDGKAVHLLWGYTDGGLPTSELPAHFMSHIARLSVDPENRVVMHCHATHLLAMTFTHELTERAFTRTLWQMCTECLVVFPEGVGIIPWLVPGTNEIGEATSEKMKENRLIVWPHHGIYGAGQSMDETFGLIETAEKAAEVYTIVMSQGGIKQAITDEQLKALGERFGVEAKAGYLNN

SEQ ID NO: 230 - protein, 420 aa, Listeria monocytogenes
MGQETEINKRYQVAKERYQAIGVDTEKALKTLKDIKISMHCWQGDDVKGFLNPDGELTGGIMATGNYPGAAHTPKQLRQDLEKAYSLIPGKHKLNLHAIYVDTDEKVDLNEIEPKHFTPWVEWAKEQGLGLDFNPTFFSHPMFKDNYTLASPDKEVRDFWIEHGKRSRKISEYFGKELGQTSINNFWVPDGIKDCPIDRYTPRKRLMEALDEVFAEKLDEKYTQEAVESKLFGLGAEAYTVGSHEFYMGYGITRDKLICLDAGHFHPTEVISNKLSSLALFSKGVMLHVSRPVRWDSDHVVIMDDELIEIGRELVRNDLLGITNIGLDFFDATINRIAAWVVGTRNTQKSLLKALLEPTADLKKMELENDFTSRMAITEELKDFPFGDVWNYFCEINGVPVGLDWLKEVKAYEEDVLLKR

SEQ ID NO: 231 - protein, 483 aa, Listeria monocytogenes
VKHYVAVDIGASSGRLILGKLVNEKLQLEEIHRFKNGFTYRDGHERWEIDQLMQEIFIGLEKVKQLGISECVLGIDTWGVDYVLIGASGEKLADPISYRDKRTLNAVQNLTSEYPREYIYKKTGIQFMELNTLYQLYVEERDLLERAEKILLIPDYIGYVLTGVKVAETTNSSTTQMLNLREQLFDKDLLSHLNIDVEKFAPLTDAGTYLGEVKEDWLKMYDIPNCDVVTVATHDTASAVVGTPAEGENWAFLSSGTWSLIGMELSAPINNEVAFKENYTNEWGAYGTYRFLKNIMGLWIVQEIARMDDYKHSFAEMAEEAGNYPYFKQIINVNDARFNNPENMVDEIRLYCRETGQTVPETIGELTNCVYGSLALYYALELEKMTEITGKKIEKLYIVGGGSNVAMLNQLTAKLAGIEVFAGPSEATAIGNLVVQMINQGEIESMRAGRKIIRNSFEIGEFSCGDVRFEEIKERFTKVLEFN

SEQ ID NO: 232 - protein, 359 aa, Listeria monocytogenes
MDEQLKMLKALTDAKGIPGNERAVRNVFREYIEPLADSFETDGLGSAVAKKVGAEDGPKIMIAGHLDEVGFMVTQIDDKGFIKFQTVGGWVSQVMLAQKVTIVTRSGEEITGVIGSKPPHVMTAADRQKSFDIKDMFIDVGAVDKAEVESYGIRPGDMIVPAFDFTVMKNEKFLLAKAWDNRIGLAIAIEVLKNLQKEQHPNIVYGVGTVQEEVGLRGAKTAAHFVQPDIGFAVDVGIAGDTPGVTDKEAMSKMGEGPQIVIYDASMVAHAGLRDFVTDVADELSIPYQFEAIPMGGTDSGSIHLTGNGIPSLSITIATRYIHSHSSMLHRDDFENAVKLITEVVKRLDKEKVTEIRLG

SEQ ID NO: 233 - protein, 422 aa, Listeria monocytogenes
MAGSSTSKKGTIAVSLTNYLDSGCIVAGASGLTLWATQFGLSSFAVGLLGAVSANAFGSAIGALIGGHLADKYGRKFIYTYNMLVYMLGVTIIMFAMNFPMLLIGFLVTGLSVGAGVPASWTYISEMADPSIRARNIGISQFAWSCGPAIIFTLGIIVSPLGLLGNRLLFLSLLIVAFVAWQLQRKLEESKDWEAEQVKMKESGNRLEHPFKTAFSSMVNVKSVLFLVGVYLFWNLVAGAMGFFMPFVYETVGGLSNTQANLLQAVLWILTAASTYFGFAKFGDRVSHRGLFFVGALMAVASWVVLTFVGMSWVGLWTFVILWGISAGIGAQAFYALWSTELFPTKYRGGVQGVMFFLVRGSTGVWSIVFPVILANLGFTVAGTIMIGLLTVSLLIGVIWAPKTRGRSLDDITKERYGNTID

SEQ ID NO: 234 - protein, 326 aa, Listeria monocytogenes
MEALNKKLFRLNSKEKIQKSTGTFVPDLPNGSFLKENGSMELLNDYFFKNKDIYISKHNRFADYPYHTHQFLELNYMYSGSSEQIIEGNKETLHEGELLLLDSGCHHSIKATGEKDILINILFRDQQISLEWLTSIKKKNSLLFDFLLHSSVSEQSLKKYIIFQSAQIPHIQQILNQIITEYFLEEEFSSRIITLYLPILFTELVRKCDTYLADDLTNSQSSTTSTMLEVIKLIESNYRTITLTSAADTLGYNKNYLSNFIKKNTNFTFTELVNKQKMLAANLLIETTSTPIELIIEKVGFSNKTYFYSLYKRTFNLLPNEVRNKK

SEQ ID NO: 235 - protein, 153 aa, Listeria monocytogenes
VVVYKGSVHEMWQKYRAEHPMITSKFEAWSFGNSARMANELGGLVMDGIKTGTSSLFYWYDQGGETMPSVGSHVVLLDGNEEAMGIIKLIGVTIMPFNEVPETFAYLEGEGDRTLEYWRKVHTSFFTNECVELGIPFEEDALVVCEEFEVVYK

SEQ ID NO: 236 - protein, 206 aa, Listeria monocytogenes
VRDITAQGSNVEEAIQKALATLETTRDKVEVEVLDEGKKGIFGIGSRLAMVKVIEKEDGIQVAIDYLLDVATKMGAVITIDVEEVGKDVKLQIKGDSLGMLIGKHGQTLNALQYLTQLIANKTTSQYKNIIVNVGDYRERRHETLVILANKMADKALKTKRAVHLEPMPSFERKIIHAILSENEQIETHSEGRDPYRYIVIKPVRK

SEQ ID NO: 237 - protein, 287 aa, Listeria monocytogenes
LKKKKRFKQKLLIASLVIGLMAVLSGCGYSTDPITSESTGFWSHYIVFPLSWTITWFSDLFGGSYAVGIIVVTILIRLLIMPLMIKQLKSQKAMTNLQPKIKELQEKYSSKDNETKQKLQQETMRLYQENSVNPMMGCLPLLIQMPILLGFYQAISRTAEIKTDSFLWMQLGNPDPYYILPVVAALTTFLSSKISMMGQTQQNKSMAMIVYIMPVMILFMGITLPSALALYWIIGNIFTVFQTLLINNPFKNKREQEALAAAQVAEDRLKKKAANMKASKKGGKKRK

SEQ ID NO: 238 - protein, 366 aa, Listeria monocytogenes
LDDKLQKKLTLLPESPGCYIYRDENNEILYIGKSKCLKNRVKSYFHSKQIGKTARLVRQIRDLELIITTSEKEALLLEMILIQKYQPPFNIQLKEGTSYPYIKITNEKNPHIEVVFEVKRDGAHYFGPYPGRFSARQTVDLIEKLFPLCRCDGKPGRPCLYYHLGLCLGPCQAEIEPAVYKKQIHKISRFLEGDVKNVKDKLLGDMLTATENLEFERAAELRDKIHAINETIEKQHIIFPGLKNRDIIGCYEQDNYLSVFVFFVRNGAINGSKWHVFQVEKTLQEELATFLNQFYEDPNNIQPKELLIAEKIDKSLLNEPLRKACLFPQKGSKKKQVDLAIENAKSAYIAYAKMKEYDFEIQLNNH

SEQ ID NO: 239 - protein, 367 aa, Listeria monocytogenes
MNQVAPFYADHVGSILRTKGIKDAREKFQSGEITALELRKIENTEIKYIVEKQKEVGLKSITDGEFRRAWWHFDFLENLDGVEGYDAAGGIQFSKVQTKSHSVKITGPIDFTTHPFIEDFIFLKEAVGDNHVAKQTIPSPAMLHYRGDIEYQPYLDDAEKFANDLATAYQKAIQAFYDAGCRYLQLDDTSWSYLCSDEQREVVRQRGFDPETLQETYKNLINEAIKHKPADMVITMHICRGNFRSTWIAEGGYGPVAETLFGKLNIDGFFLEYDNERSGDFAPLKYVTRPDLKIVLGLITSKTGELEDEAAIKARIEEASEIVPLSQLRLSPQCGFASTEEGNILTEEEQWDKLRYVVRLANDIWGE

SEQ ID NO: 240 - protein, 328 aa, Listeria monocytogenes
VTIGLGITITLFAVPIHSQAAGLEDGLTSKQEKFINEIAPHAQKVQKEHGILASITISQAILESNWGESKLAKDGNNLFGIKGSYQGASIKLPTKEHNGVVWVGTDAVFRAYPGWYESMNDHALLFVKGPSWNPHLYGGLIKEYDFEKAAIALGKTGYSSDPEYAAKLIELIKKANLNKYDTVYSERVSDKAIKATGEVAVKDNCYVWSAPGGTKGAKPVVSTTKYFGRQVSINQEVKVTDSNISWYHIHQNGESIGWIESTSIKDFYQLEDYAPTVDALLKTDDNNRLVINMDIDTSELHKTKLVKADTKEKTAFNLPLLNVQSIIW

SEQ ID NO: 241 - protein, 125 aa, Listeria monocytogenes
MAKEIIQTSSAPKALGPYSQAVKVNGLIFTSGQLGINPATGELVVGATKQAEQAFKNLAAVLEEAGSGLDKIIKATVFFKDLNEFKAVNEVYATFFSSDFPARSAFQVAKLPLDAEIEIEVIAEA

SEQ ID NO: 242 - protein, 85 aa, Listeria monocytogenes
MILTIYLIAITLISFLLFAIDKRKAIKHAYRIPESVLLFSAFLGGAFGSWMSMQLFHHKTQKPKFRILVPLAMVWTVGVVVWWLY

SEQ ID NO: 243 - protein, 880 aa, Listeria monocytogenes
LEIYRKSAAETFTQLEATEKGLTTSEVTKRQEKYGFNELKNKKKDPLWKLFLETFKDPMVIVLVIAALVQLVLGEVVESLIIFLVLIVNSIISVVQTRKAESSLDALREMSAPVAKVIRDGSKQSIHARELVPGDVVILDAGDFVPADGRLFESGSLKIDEGMLTGESEAVEKYIDTIPDEVGLGDRVNMVFSGSLVVYGRGMFVVTGTASETEIGKIAGLLETAEAKQTPLQRKLESFSKKLGLGILALCVLIFAVEAGRVLLGDNSADMATAILNAFMFAVAVAVAAIPEALSSIVTIVLAVGTNKMAKQHAIIRKLPAVETLGSTSVICTDKTGTLTQNKMTVVDYYLPDGTKENFPESPENWSEGERRLIHIAVLCNDSNINSEGKELGDPTEVALIAFSNKNNQDYNEIREKFIREGEIPFDSDRKLMSTLHTFNENKAMLTKGGPDVMFARCSYVFLDGEEKPMTEEILAKLKETNEEFSNQALRVLAYGYKRMPADTTELKLEDEQDIVLVGLTAMIDPPREAVYASIEESKKAGIRTVMITGDHKTTAQAIGRDIGLMDADDIALTGQELDAMPEEELDKKLEHIAVYARVSPENKIRIVKAWQKKGKITAMTGDGVNDAPALKQADIGVAMGSGTDVAKDSAAMILTDDNFVSIVDAVGVGRTVFDNIKKSIAYLFAGNLGAIIAILFALVLDWINPFTALQLLFINLVNDSLPAIALGMEKAEPDVMKRKPRDINEGIFAGGTMRAVISRGVLIGIAVIISQYIGMQISPEMSVAMAFTTLILARTLQTFAARSNVQTAFGAGFFSNKYVIGAVLLCFVLYGITVLPGAREIFSIPASFGLHEWSIAAGLALAAVVMMEIIKVVQNKFFK

SEQ ID NO: 244 - protein, 156 aa, Listeria monocytogenes
MDKNEQVMANVRDLFNKLAWINKVKMEKALEGYKPSEVHCIEYIAKNEDPNVTKLAEAFYMTKSAISKITKKLMDKGYIESYQKPENKKEIYFRLTTKGAEINQVHDELHQEFLDRDKVVFEDISDEQYAEVLKFVDKYSRHLDNEMKKVLKTKSE

SEQ ID NO: 245 - protein, 406 aa, Listeria monocytogenes
MFQSKSRTSLTNKKTLLFGLISVFLCGMGFSIIMPVVPFLVTPYVTNASDQALMVTLLTSVYAFCVFFAAPGLGALSDRFGRRPVLLICFIGSAIGYFIFGLGGALWVLFLGRIIEGITGGSISTLFAFFADITPQEERTKYFGWVSAAAGAGAALGPAFGGLLAHFGYAMPFFFGATITFINFLFGYFYMPESLDDANRLKRIPLMRLNPFSQLLNILTIKNLGRLLIAAFFIWVPNGSLQAVMSQFAIDSFSWKPALIGMMFSIMGIQDILSQAFVMPKLLIRLTDKQIAVLGMIAEIIGYSLIATSSIFTLAPLLVIGMFVFGFGDSIFGPSFNGMVSKAASASEQGRIQGGSQAIQSLARIIGPIIGGQIYITLGHAAPAIMGVLLITVAIFILYKKTSLAK

SEQ ID NO: 246 - protein, 461 aa, Listeria monocytogenes
MSLFSLKKKNHFVPLEIQRQQWFKHFIVAFMSVFICYLTVYLLRNNFKAAQTLLIEQNHFSTTELGMIGLAFSVMYGIGKTILGYVVDGRNAKKIMSFLLGISAIISIIIGILLVAKQATVGILFILWGANGFVQSPGGPASYSTITRWTPKLKRGRWLGFWNASHNIGGALAGIVAFWGATTFFNGGAGGMFIVPGIIAIIIAIICFSVGHDEPEELGWNSAAEIFEEREEQGESETKDLSRFQILCRFVINNPWVWTLCVINIFIYIVRIGIDNWAPVYCIQALGWSTKDAIMTISFFEIGALLGSLSWGWLSDIMKGRRMLCSIIAVVIEFFMLISYSQVTSVYSMYTVLFILGFLVFGPQLLIGVSVIEFVPRNALAVTNGLTGTFAYLFGDSFAKVFLGYIADPTKAGMQIFGYNLHGWGATFTIMFTALIIAGLMMIPVALKQEKIIRQAKVLHL

SEQ ID NO: 247 - protein, 577 aa, Listeria monocytogenes
GGIVILKRFFSYYKPYRTLFIIDFGCAVLAAILELAFPVAVNHVIDTLLPGKDFGLIITAALALLFFYILNTFMQYIVTYFGHMLGLNIETDMRRDLFSHLQKQPFGFYDNQKTGKLMSRMTTDLFEIGEVAHHGPEDIFISIMSLFGAFFLMLNINVKLAISTFILVPILTVLIVYFNKRMTKVTTGIFKDLGNFNAGVENAISGVRVVQAFANEPHEKGRFKVLNQAYRKSKLMFYKVMGLSFSFNYFLMRLISLFALLFGAYFTINGEISYGEFVGFILLTNVFIRPIEKINNVIESYPKGFAGFKRFLEVMDTEPAIQDEKDAKPAEAFRGDIAYNQVSFEYSDGKNVLNHINLSIKAGETVAFVGPSGAGKTTICNLLPRFYDVSAGEITIDGENIKRFTLPSLRAQIGVVQQDVFLFSGTVRENIAYGKLDASDEEIEHVVKLAHLSKVVEEMPDGLDTIIGERGVKLSGGQKQRLAIARMFLKNPPILILDEATSALDTETEQVIQASLEELAEGRTTLIIAHRLATIKHADRIIVVNETGIAETGTHDELLAQDNGAYKRLYDAQFNTI

SEQ ID NO: 248 - protein, 137 aa, Listeria monocytogenes
MKRLEKISSIVPILLRITLNLALIMVGFTLVAFLIREAFTIFNNIFFLDTDVSYYYMTQDILTFFLYFEFIALIVKYFESHFHFPLRYFIYIGITAIIRFIIVDHSSATSTLILSGAILLLVAALFLANTKMLKREG

SEQ ID NO: 249 - protein, 248 aa, Listeria monocytogenes
FSHVFWKGEIFILNQKYQLLLHNEYDTKSGDLVKKEIVATKKTKNLLEDLTSHLLCVTNQIEYGKFITWYEMEIKKVLQVHPNQHFIIKISFQQLYFRETMLLLENLQKDSRRLTIELVGDSQISPYSKEHFSAEDSDAFLKGKLKMLKKWHYFISKHIESGAIEQTLIFTPYIDELKYSLTQKSKLLHNITELKFFLSFWKNWAELRFVDFLVLVDEKNEFVSHVLLPDELNVRCKMYENFGGMVSE

SEQ ID NO: 250 - protein, 289 aa, Listeria monocytogenes
LKYRKLSKKKKQKRLIGIAGILLLVILVGVIASVVRQQYLIMTAPEPDPAFHSKEQNFLNELSPRAQEIQEKHGILTSITLAQAILESDWGQSGLAQKGNNLFGVKGKSPQPMVTMTTKEFVDGKWIEINANFRKYKDWNESLDSHAELFLNGTSWNKDKYNGVIAADDYKKAAQELQSAGYATDPDYAEKLINIIEKYDLALYDRIEDKIYYDTKSTGFGNVKKDVSGAIWTKPYGLSGALKVEEINYYKREDLKLLREAKTDSGTWYQIAVDTEPIGWVKQELIDKK

SEQ ID NO: 251 - protein, 296 aa, Listeria monocytogenes
MVAYGELIREVRLSKGLTQKEVYTGVISKSYAIGFEKGKHDITLVLFEEILERVMLSSDEFFFMNRGYSLAEEDNFWYKFANAANQKSLAELQELYQEVLQQNGDRANLRKAIVHSRIEINEQFLLNNRFDVSIVSEEDKAVIQTYLWKVQSWTLEEIRIFANSVDYFEEDVQIYFFQLVLKSLEKYKHYDRGKKVFSTLLTNIIEELITRDQLEYAAQLLEILHELSSTHDCAFYRIMHNYYQGLIWMKNDEVEQGLKESKSAIRILDALDYKSLALLYNTLLQQFLEKENIQIV

SEQ ID NO: 252 - protein, 94 aa, Listeria monocytogenes
MPKKLYNEKFKKSLVYLYHKGTSKHTLCNDFGVSIASLTRWIKFYNTENIDLNEATNILQMYELKKQKKVLEAEISALSEAISIFNMETSIAEN

SEQ ID NO: 253 - protein, 303 aa, Listeria monocytogenes
MEFLLILLPVFGIFAIGFVGQKTLKFDIPNLSKLTLYLMSPFLAFNTFYTNPLTIDYAYLAIYIFALCLSLILLVSLISFLLGYNLQDRCALILASAFMNNGNYGTPVVLLVFGAVGLDIAVVLMVLQQLAMSTIGIYFAAKGSKDANGMKTVMKRVVRMPIAYGALLGLALQLLHVSLPSALMTCVKLVGDAAIPTIMIVLGMQLAVISFRRIELTKVGIALVLKLLIAPIIAFGLTLILPVDEMTKQIMILLAAMPTAANTTLMAVQFDTKPDLVSSATFISTVLSIITLPIVLYFLHPVF

SEQ ID NO: 254 - protein, 653 aa, Listeria monocytogenes
VKTIDMKYLRLLAKEYPTIAKTATEIINLEAIMNLPKGTEHFLSDVHGEYSAFEQVLRNGSGVVKRKIRDIFGAELDDAEINSLSTLIYYPEEKMDLIASETEDLHAWYRTTLFRLIELCQYVASKYTRSKVRKAMPEDFAYILEELLHENYNEDDKKLYYEEILQHIISLGRAEEFISALSLLIQQLVVDHLHIVGDVYDRGPYPDKIMDTLMNYHSLDFQWGNHDILWMGAASGSRVCAANVIRISARYLNLDILEDSYGISLRPLALFADEVYKDDPCTYFQPKNEENINYSNAEITQIARMHKAISIIQFKLEGEIIKRRKEFDMNHRLLLQFIDYKKGTIQLKGKEYQLLDNHFPTINPENPYELTDAERELIGKITAAFKNCRRLQKHVQFLYSKGSMFLTYNGNLLYHGCIPLHKDGTFMEMKLRGEKYAGRALLEQFEILTREAYVRPTGTKEKKYACDIVWYLWTGAISSLFGKSEMTTFERYFVAEKETHTEEKNPYYKLRNNELICKQILEEFELDGECGHIINGHTPVKEGKGESPIKASGKMLVIDGGFAKAYHKETNLAGYTLLFNSYGLQLVSHQPFTTKEDAIKNETDILSTRQVIEMEINRKRVRDTDIGAKLSEQAEDLKLLLDAYRNGLLHENR

SEQ ID NO: 255 - protein, 1215 aa, Listeria monocytogenes
MRNRKTMDGNTAAAYISYAFTEVAAIYPITPSSTMAELVDEWSSKNKKNLFNEPVKVVEMQSEAGAAGTVHGSLQAGALTSTYTASQGLLLMIPNMYKIAGELLPTVFHVSARTISAASLNIFGDHSDVMAARQTGFAMLAEGSVQEVMDLSAIAHLASLKGSLPFLNFFDGFRTSHELQKIEVLEYDELENLLDKEALQQFRNRAMTPNNPKTLGSNQNPDIFFQQRETVNRYYEEIPSIVQNYMQEINQLRGTDYDLVNYYGAEDATDVIVAMGSVTPVIEQVIDYLTTQGKKVGLLNIRLYRPFPAENFLTKLPKTVERVAVLDRTKEPGSGGEPLLLDVQSVLYDSETRPLVIGGRYGLGSKDVTPDQILGVYSHLMTEKPKPRFTIGITDDITNLSIENDGPSDLTSEKTFQCKFWGFGSDGTVGANKAAIKIIGDNTDLYAQGYFSYDSKKSGGLTVSHLRFGEKRIRSAYLIQQADFVSCSTSAYLRSYDLLKGLKPGGTFLLNTIWEGEQLERHLPAAMREYIAKNNIQFYTLNAMRIAGEAGLGRRINTVMQTAFFRVTDILPFEKALADLKASAIATYGKKDMAVAEKNILAMDQTVANLHKVEVPASWANPVVTAETNATTEKPAYVQNILEPVNRLEGDNLTVGDLISNGMVSGAYPPGTAAYEKRGIALEVPEWISENCTMCNECAFVCPHAAIRPILTDEEEMESAPEGFMTREMRGKDGLRYRIQVSPMDCTGCNLCAETCPAKDKALVMKPFEEVAAKENPNWSFAINVKPKKNPGKKNTVPGSQFEQPLLEFSGACAGCGETPYVKLLTQMFGDRMMIANATGCSSIWGASAPATPYTVNDKGHGPAWGNSLLEDNAEYGYGMYLANQTMRKALNNKVTKALREEAMSETLREALVDWQLQMDVSEDTRERAEALQLALLSEMEDSAALESIYNDRELFIKRSQWMLGGDGWAYDIGFGGIDHVLASGEDVNIFVMDNEVYSNTGGQSSKATPTAAIAKFASGGKSVGKKDLGIMAMSYGNIYVAQIAMGANKRQTLKAIEEAEAYPGPSLIIAYTPCINHGISSGMKTMLSETQKAVECGYWSLYRYNPALEEKGKNPMTMDYKKVDFDQFEDFLKRETRYSALYKANPEVATKLSEKTRLDAEKRFKRYATMAGLDLEKIWKKKEAIEDVKAPVDDERAARKAAREARRLAREQGK

SEQ ID NO: 256 - protein, 278 aa, Listeria monocytogenes
VNPAYFVLLVEELKTKYLVKDICQILQVPLSTYYRWKKKDFSQSSLEKKIGQLCKAYQFTYGYRKIAALMKQEEQVGINKVQRIMQKYQWQCQVKVKKKNRPGSAYYQTENHLNRNFQASQPLEKLTTDITYLYFGDCRLYLSSIMDLYNGEIVAYSIGEKQDTELVLDTLNQLSLPEGSLLHSDQGSVYTSYEYYQCCKKKNVIRSMSRKGTPADNAPIECFHSSLKCETFYHKTAYKYAKSIVIQIVKDYIKYYNEKRIQQKLGYQSPINFRKQAA

SEQ ID NO: 257 - protein, 101 aa, Listeria monocytogenes
MSTRVMYPAEIKEKAIKMKLAGKSTKEIMRTLNIKNPTQVKTWWRWYRNEETHRFHQGVGKQYKYQKGVPELPEIEQLKIALRQKELELEILKKYKALERK

SEQ ID NO: 258 - protein, 544 aa, Listeria monocytogenes
MGDINIQQMIFQFIGGLGIFLFGIKYMGDGLQMAAGDRLRDILDKYTTNPFMGVLAGILVTVLIQSSSGTTVLTVGLVSAGFMTLKQAIGVIMGANIGTTVTAFIIGIKLSEYSLPIIAVGAVLLFFFKNHKVKNIGQVFFGFGALFYGLDLMGQGMKPLAGMESFHELTAQMSTNPFLGLLIGTIFTAVVQSSSATIGILQELYGQGAIDLQAALPVLFGDNIGTTITAVLAAIGASVAAKRAAATHVIFNLIGAIIFMLILPLFTSLVAYLQGMFGLNPEMTIAVAHGTFNITNTFIQFWFIGAFAWLVTKLIPGDDSRIDYKTKHLDTNLIDQSPGIALEMAREETLRMADYAKFGLQEARQYLVNRDSKHAESTVQVEEAVNNLDRKITEYLTKISSVALTNNETEEHALMLDTVRDIERVGDHMENIVENIDQLIKNKAKMSEEASEQLIEMFELTTANFERAVKSMHKKDRALAEETILVEKDIDKAERRLRKNHIRRLNEGKCQVVSGILYIDIVSDLERIGDHANNIAESVLELNE

SEQ ID NO: 259 - protein, 426 aa, Listeria monocytogenes
MNAFDKFYKKTVEERHAILAEYADLNEEEQAFLASTGALSFDKANHMIENTIGIYSLPLGLGMNMLLNDKRYVVPMAMEEPSVVAAQSAGAKLIAQNGGITGSATKRKMIGQIELISVSDIQAAKENIIANEEQLIAIANQAHPSLQKRGGGAVKIQVRTAQTANDETLFIVHLLVDTQEAMGANMVNTMVETLAPELEMLTNGTANMRILSNLVDEATATAVCRINPESLATKTQSGEWVRDRIIAAYEFADADIYRAATHNKGIMNGIDAVIMAFGNDWRAVEAASHAYAARTGSYKPMSKWSKDADGYLVGELTLPMPVAFVGGSIAIHPIASLSKKIARVESAKELAMLVCAVGLTQNLAALKALVTEGIQRGHMSLQAKSLAMTAGAEADEIEIVATFLQESKQLNVVAAKEFIAKLRSEK

SEQ ID NO: 260 - protein, 322 aa, Listeria monocytogenes
MDAKTIIENRFQSQKLIQTAWSGSPERIVFHFGAMQAQNYGQSLWAVGSRMTTPSEKAVEQAINNGEIIRTWLLRGTIHLFSAKDYHWMMDLIAPTIDKICKPYRAKLDLTEEVLQKAIEVVSEIVSEQAVTRKDLAAHLATKDLPSAGIAFAQLLVYLSSRKVICSGPDETFRNTTHIPADTNHFTREEALKELAKRYIQSHAPATLKDFCFWSGLTVTDAKIGLADMPKIGDYYITTLVKNGTMLATIPLAGFDEWIIGYRDRSAVLPEIWHDEIMTKNGIFRPAIITNGEVVGKWEKPKKRAELEGDFWDRYIQFRNML

SEQ ID NO: 261 - protein, 274 aa, Listeria monocytogenes
LNLKDTVKLANGVEMPRLGFGVWKVQDGDEAVNSVKWAIEAGYISIDTAAAYKNEEGVGQAIKESGIKREDLFVTTKLWNAEQGYESTLAAFDESLRKLELDYVDLYLIHWPVKGKFKDTWRAFEKLYKDKRVRAIGVCNFHEHHLKELMEDAEIAPMVNQIELHPQLTQEPLRKFCAENNIVVEAWSPLGNGKLLSNPEIKAIADAHGKSVAQVILRWDLQIGVVTIPKSVHQERIIQNADIFDFELTEEEVAKISGLNKDERTGPDPDNFNF

SEQ ID NO: 262 - protein, 129 aa, Listeria monocytogenes
VQQTIKEASEHTGLSAHTIRYYEREGLIPFLARDKNNNRIFDNDALHWLELLTCLRVTGMPLAKQKEIVELTKGGDGTVSERIAVLKEHQQDMYRRQAELDRAFKKIEKKLACYEELEQEVNKSVDQFS

SEQ ID NO: 263 - protein, 220 aa, Listeria monocytogenes
MKKIIFTVVLSLVLVLAGCADVTNTVKVDKKGEATISFDIDISSVAGIFASSYSDEVEAKLKEAGFTVDKKSNTSYHIEKKVDKNETTKSDMKPEDFGVKITNSKSFFTQKIKVDADIDIEKIWKKEVADVPFPKEILSQVDYTFILDLPISSIGENNAKSVDGGKLTWDVPLDKKSEMYFEVTVPNVKNIAIVGGILLVVIIGLFIYLIRRHRKKKKQL

SEQ ID NO: 264 - protein, 185 aa, Listeria monocytogenes
LIRHAKKSDAPKIAPLLLVIWKDMELPILEVETEEAITNALIEAIQTEDYRYSYRHLHVYEKEGDIAGVLAGYPGKIEPEIDRAWNEIAKKHGIRYEEPIFADKETFPGEWYLDSIVTNEKYRGHGVGTALLAKLTEIAAEDGEKVVGLNCDKGNPHAKRLYERLGFHVTGEITLSGHEYEHMQK

SEQ ID NO: 265 - protein, 282 aa, Listeria monocytogenes
MNETEKLVAALLERNFGKNIGTRYPGNEAAQMRAEEVIGEIAIVIAPLVEKLGIENKTVKKTIPFLYELQKNQFCDMSAYPYPLLLVNGTSTDTEKYWRDLPTYWTDDANKIVLPYVLEHIKNNKVRQKLLAFHAWLLGEVVEMNEALGADFRVKLVFESDMRIRLRVYEVEQIAIEVHFLDNHDTEQQHLGYDVSLDADFTEKARLLLRQGILTENLGLEALKAYMKSVLPIAHSLKNLEHLTFEETKKLTKLLTQEEPKIMEDTDLTSKALDFLQKAAQQ

SEQ ID NO: 266 - protein, 876 aa, Listeria monocytogenes
MLWVKESIEQLLSKLHTNLDTGLTKEQVKQKHAEFGTNEFEEGKKESLLQKIGHHLVEITTIVLLFAAAISAYLAITTGYGWAKVVVILGIVVLNMVLGIYQENSAEKALAALQSMNAHLTTVIRDGVRMQVDATELVPGDIIEIVAGDMIPADARIISSSSLQVEESALTGESVPVEKDANAVVSEKAPIGDRLNMLYSGCLVTNGRATAVVVEIGMETEMGKIAGLLNSTSKLMTPLQLRLKELAKRLSIVALLAGILIFIIDVYVYGETIIETLMIAISLAVAAVPETLPVIVTLTLAYGVQNMVRKNTIIRRIPAVETIGNTSVICSDKTGTLTQNKMIIQQIWAADHTPIKATAEFDTAEQKVLEMLSLSSNATIDVTDGEETIIGDPTESAIIRLLEEKGTTKKALEAKYPRVFELPFDSDRKLMTTIHQVEDGFLSITKGAFDRIPVNFSEAFLAEAERVHDSFAEDALRVLVVAYKKYPEMPTDLSSEALETDLTFAGMVGMIDPPRPESKAAVLAAKKAGIKTVMITGDHIVTASAIAKEIGILTDGDKAITGAELAEMSEADLEKNIRDYAVYARVSPEDKIRIVKAWQKNGEIVTMTGDGVNDAPALKAADVGAAMGITGTDVSKNAADMVITDDNFATIVDAVKEGRTAYENIRKTIYFLLSTNFSQIFIMLIAIILGWGAPVVAVQLLLINVVSDGIPGFFLSREKADDSIMERKPIPKNAGIFANGLGKKMATQAVVFTIVTLAGFYIGQFVTINNSIGASYEVGMTMAFVILAWSSVAHIFNVRSDKSIFTIGFLSNRGLFFSAICSMLIILGLAIIPPLANMFFLVEMSLTHWILAFILSMFPLLFVEIQKLIQRKRAKA

SEQ ID NO: 267 - protein, 237 aa, Listeria monocytogenes
LVKYELIAADIREKINNGTYPPESILPDQVSLCKAYDCSRMTIKKAFDVLALEGLVYRQRGAGTFVMKNALANKQDASLRDYDGLTKMMGDNRISSKIIAFDIAFPDEKTQEQLLIKADQPVYKLIRLRLLDGAPYVLEHTTMPADLVPGLTREILHHSIYAYLQDSLGLVLSGAFRKINADKPSEYDQEYLACGEHDPVLEVEQVVYLKDGRPVEYSRSRHRYDTRSFIMVDHREK

SEQ ID NO: 268 - protein, 428 aa, Listeria monocytogenes
VNKFMELLGEKLMPLAAKLGENRYLTTLRDAFMLAFPLTMFGSIAVVLMNLPFWSDETKAVLQLYLGNAQSATMSIMTVFVVFGIGYSLSKYYKVEAIYGGAVALASFLILTPFFFNSPDGELITGALSLDRLGAKGMFIGMITGFIAAELYRFFVQRDWTIKMPAGVPPAVAKSFAALIPAILTLSIFLAINVMVQFFFHTNLHDVVYTVIQKPLVGLGSGIVPTLIALFFVQVLWFFGLHGQIIVNSVMDPIWNTLMLENLDAYKAGLPLPHIITKPFMEVFTVGMGGSGMTLAVVIALAFLMKSKQSKEIGRLALGPGIFNVNEPVLFGMPIVLNATILIPWIIAPLIVTTLNYFVMAAGIVPAPTGVAVPWTVPIVINGILATNSWLGGALQVVDFFIVLIIWYPFLKLVDRTNIARESEAAIK

SEQ ID NO: 269 - protein, 130 aa, Listeria monocytogenes
MDNKLEFTTIDEYITQAPPETKEVLQKIRETIKAAAPEATEKISYQMPTFYLEGNLVHFAVAKNHYGFYPASSGIAAFESKLGNYKHSKGAVQFPIKEEVPYELIKEMTLFRLAENKQKAAEKLAKKKKK

SEQ ID NO: 270 - protein, 155 aa, Listeria monocytogenes
MNQAELQRHMEEVSLQFFQKEFRHQAVFNARLRTTGGRYLLKSHNIEMNPKYLENFGLAYFIGIMKHELCHYHLHLEKKGYQHRDQDFRELLKKVDAPRFCATIPREITMHEYTCKSCGKSFLRQRRFNVNRYRCGSCGGKLIQTDSKKIYTENP

SEQ ID NO: 271 - protein, 176 aa, Listeria monocytogenes
MKIRIIGSVGSGKTTLAKKLSEWYQIDYFETDRIVWKREGIEVRRTDIEKIAVLNKILQQENWIIEGVHLEAWVNESFDQADVIIFLNLPKKQIRSQLIKRQIKQLLRLEAAHYQVKLNMLNKMFYWDDLFDQRTKPLIAEKMAQTPTKWLVVTEKTALQEIQKKLLQIISSRDIL

SEQ ID NO: 272 - protein, 725 aa, Listeria monocytogenes
MEQMQDKIMKLVQKSLTYKPAQINAVIKLMEEGNTVPFIARYRKEMTGSLDEVEIRDIEETFEYVTKLENRKEEIIRLIDEQGKLTDELRAAIVKAEKHQALEDLYRPYKQKKRTKATIAKEKGLEPLAEWLMSFPSNADPLTEAANYISEEKEVESAEAALLGAHEIIAEQISDEPSFREWIRNFTRKFGMIESRAKNAEADEKGVYEMYYEFNEMIGKVASHRILAFNRGEKEDILRVQVQVDTTKIFQYLFEKVIQNRNSATRPYVEEAILDAYKRFIGPAIEREIRGELTDKGEEQAIHIFSENLRKLLLQPPLKGKIILGVDPAFRTGCKFSVLDQTGKVLEIGVVYPHTAKARRPEAKQKIAEILSTYQVEVIAIGNGTASRETEQFIVEVIRESNSNAYYCIVNEAGASVYSASETAREEFPDYQVEERSAVSIGRRLQDPLAELVKIDPKSVGVGQYQHDVAQKRLNETLTFVVETAVNQVGVNVNTASASLLQYVAGLNKTVANNIRKYREENGSFASRKELKKVPRLGAKSYEQSIGFLRILEGENPLDKTAIHPESYKAAEQIVKAAGFGLKDIGSEDLKAALQALSIPEEAEKLTIGKETMRDIIDNLIAPGRDLRDELPAPLLKQDVISMEDLKQGMELQGTVRNVVDFGAFVDIGVKQDGLVHISKLSNSFVKNPMDVVSVGDVVTVWVDEVDTKKNRIALTMLNPNGSVK

SEQ ID NO: 273 - protein, 541 aa, Listeria monocytogenes
LKKVLLNSVKGYTWARFRKDLLAGIIVGIIALPLAMSFAIASGVSPEYGIYSSFVAGIIVSIFGGSKFQIAGPTGAFIPVLLGIVLTYGYQDLLVAGMMAGVLLCLMGIFKIGTLIKFIPRPVTIGFTAGIAVTIFMGQVGNFLGLTGMEKHESFVANMKEIWLHLDSWNFYSVLISCICMLVLFIFPKILPRIPAPLIGLVVTTAIAMLFFPDALPTIGSAYGNIPSTFPPFEFPDMTFANMSKLIGPAFVIAMLGGIESLLSAVVADGMTNTKHNSNRELIGQGIANIVTPMFGGIPATGAIARTATNINNGATSRVSGVIHGVFVLLTLLVLAPVAVNIPIAAMAPILMLVAWNMSERKTFQHIIKLKSGDTLVLVITFLLTVFASLTVAVEVGLLLAVVLFAKQMGSSMQIEEIEPEGAEIAPHLHEKISIFTIRGPLFFGAAQIFQQNIIKAIHVKPKYLILRMGKVPIIDATAEGYFHQIEKEFSKQGGQILITGLTDKAKESLKGSGLYDRIGEEHFFSHTEDAIHYAENALNK

SEQ ID NO: 274 - protein, 199 aa, Listeria monocytogenes
MNKAVESNNLFVFQRSKALQQYCGDVYYTHEDENGFLYVLSDGLGSGLEANRAAKATVDAIKEDIHADITDMLEKANQAVSGLRGAAIAIIKGDYLTKTLYYTGMGNIRFYMIGIEDKLIFPLSGSGFLSGRKQKYRLQSFKYKPDSKFLMHSDGLVLSRVRKSLESPLCVVKTGHLIERNILDIPTDDVTFMVGKFPE

SEQ ID NO: 275 - protein, 259 aa, Listeria monocytogenes
MPKVSQPDKEAKEKVYIWIAAYQENGDQDAQYNLVVHYKNLVESIARKYSQGKSFHEDLVQVGNIGLLGAIRRYDATFGKSFEAFAVPTIVGEIKRFLRDKTWSVHVPRRIKELGPKIKNAVEELTRELQSSPQISDIADFIGVTEEEVLEAMEMGKSYQALSVDHSIEADSDGSTITLLDVVGGTDDGFERVNQRMLLEKVLPVLDEREQKILQYTFIENRSQKETGELLDISQMHVSRIQRQAIKKLREALQNEEVE

SEQ ID NO: 276 - protein, 157 aa, Listeria monocytogenes
MATMHDKITLQLPAKPEYVSLGRLSLSGIASRAGFSYEAIEDLKIAVSEAITNSVKHAFKGEEDGEITVEYLIYEDKLEVRVSDNGTSFDLETRKQEIGPYDVGEDAEMMRIGGLGLFLIETLMDDVKLYYDEGVSVVMTKYINEKQVEENAKSIST

SEQ ID NO: 277 - protein, 114 aa, Listeria monocytogenes
MNISIEIKERDTDHIDIFVAGEIDAYTAPKVKEALEVYQVKEGIVLRIDLTEVSYMDSTGLGVFVGAFKSLRQRQSELVLFGLSDRLFRLFEITGLSDIIEIKNVEGEMNGNNA

SEQ ID NO: 278 - protein, 149 aa, Listeria monocytogenes
LIILFIVSGLLAGMVLPVQTAINTRLSTYTKSPFLASWVSFMVGTTVLLIVCLFTQKSWPISSEMIASNPWYIWVGGGTLGVIFLTANILLLPRLGSALLVMITVCGQMIMAIIIDNFGLFQVPMHEINIERLLGVILMFGGIYLMQRF

SEQ ID NO: 279 - protein, 334 aa, Listeria monocytogenes
MEKAFEGKYRDILIQYLEHQDEEILYTCEKLSREAMEERVSPEEIVHLHRSVLELYGKELPDFVRLSFDVLLEIMVGYGLAYMEHLSLRTEQKELRSEIAQAEDMQKTLMKTEVPEHDELDFGVISVAARQMSGDYYSFTEEGDKQIGIALADVIGKGIPAAFSISMIKYALAGMTGDDRKPSIVLESLNQVAEENINDNMFITMFYGLYHEDTHLFEYGSAGHELGLYYQHKENSFSDLYAKGLPLGVDKNAIYRQFDKKIEVGDAVFIMSDGVTETRTANGFIEREELTEIIAAHISLSAEKMVHAIYDQLVKMQNFELHDDFTLICIKRTK

SEQ ID NO: 280 - protein, 136 aa, Listeria monocytogenes
MTFQSCVKIINEWDIVAARQLGRKISKEIGFGTVDQARITTAISELARNIFLYAGRGEICIEKVSESGKQGMIIVAKDKGPGIVDIRKVMQDGYTTSGGLGAGLPGVKRLMDSFDIESSIEGDSKGTVITTTKWVR

SEQ ID NO: 281 - protein, 118 aa, Listeria monocytogenes
VGIPILKLGECLLISIQSELDDHTAVEFQEDLLAKIHETSARGVVIDITSIDFIDSFIAKILGDVVSMSKLMGAKVVVTGIQPAVAITLIELGITFSGVLSAMDLESGLEKLKQELGE

SEQ ID NO: 282 - protein, 278 aa, Listeria monocytogenes
MYKDFANFIRTNKADLLNDWMNEMEKQSDQLINDIAKEAMYEETSKEFVDLIVSNVTENGSKFNEKLDDFAEKVVHLGWPIHFVTTGLRVFGLLVYTAMRDEDLFLKREEKPEDDAYYRFETWLSSMYNKVVTAYADTWEKTVSIQKSALQELSAPLLPIFEKISVMPLIGTIDTERAKLIIENLLIGVVKNRSEVVLIDITGVPVVDTMVAHHIIQASEAVRLVGCQAMLVGIRPEIAQTIVNLGIELDQIITTNTMKKGMERALALTNREIVEKEG

SEQ ID NO: 283 - protein, 115 aa, Listeria monocytogenes
LMVKRGDVYYADLSPVVGSEQGGIRPVLIIQNDIGNRFSPTVIVAAITAKIQKAKLPTHVEATRKDGFEKDSVILLEQIRTIDKQRLTDKITHLDEDLMAKVNKALEVSLGVVEF

SEQ ID NO: 284 - protein, 92 aa, Listeria monocytogenes
VLEKENRMIISVELTQEMIQELDVVVEKEKMGRSEVIMEATQQFLQEKRARELRDEMERGYAEMATINFAIACECTHVEAEAEDRNISILGG

SEQ ID NO: 285 - protein, 368 aa, Listeria monocytogenes
MVTGWHRPTWIEIDRAAIRENIKNEQNKLPESVDLWAVVKANAYGHGIIEVARTAKEAGAKGFCVAILDEALALREAGFQDDFILVLGATRKEDANLAAKNHISLTVFREDWLENLTLEATLRIHLKVDSGMGRLGIRTTEEARRIEATSTNDHQLQLEGIYTHFATADQLETSYFEQQLAKFQTILTSLKNRPTYVHTANSAASLLQPQIGFDAIRFGISMYGLTPSTEIKTSLPFELKPALALYTEMVHVKELAPGDSVSYGATYTATEREWVATLPIGYADGLIRHYSGFHVLVGGELAPIIGRVCMDQTIIKLPREFQTGSKVTIIGKDHGNTITADDAAQYLDTINYEVTCLLNERIPRKYIH

SEQ ID NO: 286 - protein, 118 aa, Listeria monocytogenes
MIKGIGLDMIDLERVKQVVEKNPRFIERVLTEKEIKQFEKYEGNRKIEFLAGRFAAKEAYAKANGTGFGKHLSFTDVEILQVEDGRPHVTLPVKSGENVFVSITHTARSAAAQVIIEI

SEQ ID NO: 287 - protein, 249 aa, Listeria monocytogenes
VLYADENSFDIGAKITKTKPVILPIGAVEAHGPHLPLGTDNILASEYSAKIAAKTDGFVLPVLPYGQVWSLQDFPGSLTLSNETVTKVVVEIGESLYKQGFRLFVPVSGHLGNMAALKDAARELYAKFPDMVILHIFYPNIQKLAMDVREGKANHHTYIHACEIETSLMLYLSPENTDMSRAIDDPPILPIDADFTPTPWQTFTKTAVLGEATLATAEKGEYLIEKTLKTCVELIKLEQEKIRKSTEME

SEQ ID NO: 288 - protein, 155 aa, Listeria monocytogenes
MTKRSSKSLLLFMAMGLVSGLLSPIQTSINSQLRLTVGSPFVASFISFLVGTTLLTLVCLIVERRLTFQLKGVGRIPWWVFTGGALGVLFVTSNILLLPLLGSAMTVVLALCGQMIIALIIDHFGFFGVIPHPINRYRMIGVLLMLIGVFLIQRF

SEQ ID NO: 289 - protein, 459 aa, Listeria monocytogenes
VKHIVIIGGGLSGLAAAYELQKTHPNYTWELVEKDEKLGGKFETVKRDGFLIEKGPDSFLARKPAGVGLVKDLGLEDKLIANATGRSYIYHQKALHPIPEGSVMGIPTDKEALLASTLVSEIGKARALQEPTMERNNQERDQALGDFFEARFGKELVKTIIEPLLSGIYAGDIYKMSLRATFPQFEQTVKKYGNLMDGLKESSMQTTGTKATIGAFRTLEGGLDALPKAIAAALPKENLHTAKQATEIVKKNNAYEISFADGDKMEADGVIIAATHDALIHLLAETTTEPFAGQPLTTLATVSLAYNEQDVPILPDGTGYLVARTAPYKTTACTWVQKKWPHMVPKNKMLLRGFVGKAGETWLEQASDEAIVSAVLRDYAEIMDLHAAPLFYEVSRMKSAMPQYLVNHQDRLKQLKKNIKTDYPGVFFAGMSYEGVGIPDCIAGAQTAAKELVDYLEEV

SEQ ID NO: 290 - protein, 491 aa, Listeria monocytogenes
MFEERRLHPIALIKEIITNVRRNIVPIVVGLFSVFRAINSNGYLPDWAVYLIIVIVILLILTPAVLKYITYKYTLEDQGIRIKYGLIFRKNTYIPYERIQTVQKKQWFFFIPFNVCQILIETAGGNGKAEADLVAVPVGVVDELKDLRDGKKRDIQEAVPETEETTVEVAEAPEKTVMLQTKQLILMAVTSGGVFGTLLIVLAFMQQFREVIPTDWMEAQAEELWKMGIIVLIVLIVLILLVLWGISIVTTLFKYFQFKLMKYPNSLVVEKGLLERNHTTISLSRIQGITIIESPLRQMLGLVAVKVTTAGNSGDEKLTGDILLLPIMKKALAIKTLKEMLPDYLFEIEEMECAPKASLRRFLQIYLIWTIIPAAVASILFFPLGLISIILPILAGIKAIASYRATGIFTDKHTLLVQSRPIFSKLTHIIRKERIQGLSLRQSIWMEKGGSRHLNVWLKSGSTSAEAYVRYINQDLAIKVYNWYSPSKTTN

SEQ ID NO: 291 - protein, 160 aa, Listeria monocytogenes
MELDNLEKKLPEKIKTVWRQTEGIAVLVFLLCSVAAAIILYYTGASVWWSAIGFGLTVLYAAFIYLFIIPFRFARWSYQIKPDEMEIQHGIIFRSRVLIPMIRIQHVETEQGPLLRRQKLVSLSITTAAKTHKIEAVNESESDELRHHILELVKVAKEDV

SEQ ID NO: 292 - protein, 158 aa, Listeria monocytogenes
MKKKGYVLLIIALLSLTLNWLPEIAHAQKETTATTYTTATTSELMDMFLPYPIQNPYIETTKNSAELMFVTEEAASITTETNNQTQSIAGSTENHQFTLANLQPGNNLVTITATMADGTSESKTITINLPEEPKKDSKSFHDHSKNQQVTHRKKGHLL

SEQ ID NO: 293 - protein, 255 aa, Listeria monocytogenes
MNIKEKLAVQLYSVRKEMERDLEGTLRKIHEIGFHYVQLDGMRGNDSREVRCLLQKYELKVIGMHIKHDRFMNDLDGIIEEAYFFDCKTIFDKYIEEEDQTTAGYMATKAALINAAEKLHPLGFRIGLHNPEYDFNECIHGRRVMDYITDPVDGICIYAEPDTYWIRAAGHDETEYIKRYSGRAPIVHMKDFLSGFELEDMDNNLVEIGQGEVDFRAIIEWGEVNGVEYYCIEQDRSKRDMFETLEASYQYLLQL

SEQ ID NO: 294 - protein, 317 aa, Listeria monocytogenes
MEKIIVNGRKNGQKIEIACSNLVMGAGDFLRADNMDFAGPVLDQYFEMGGNIFDTARHYRHSEKAIGAWMNMRGNRDSVIIQTKGGHPVREASDVPRVTPEAIHEDISVSLDTLQTDHVELFALHRDNPDVEVGSIMEAMHKEVEAGRVYAIGLSNWELSRIIEANEYAVNHGLTPLSFNSPNFSLAKVNRPRWENCVSANEEMIRWHEATNLPLFSWSSQAGGFFSGRFSEEDTSDTEMVEVYYSEANWERYSRAKQLANQKGCTPIQISLAYVLTQSFPTAAVIGPENTTELQSSVAAAGIKLTASEVDWLDLKA

SEQ ID NO: 295 - protein, 242 aa, Listeria monocytogenes
MKLIINENEQLVAETVSRRIIELVKEKPASLICIAGGDTPLLTIEALIKANQAGEVDFSNTQFVGLDEWVGLGRETKGSCIQTLYDAFFDRLKNVSSEQICFFDGKATSLTDECARVDKFIDDRGGMDFILLGIGLNGHIGFNEPFVPVDVNCHVVELDDVTKRVMSKYFDTDLPLTHGISLGMQQILAAKEIFLVATGEKKIDIVKQVVEKEPTVAIPATLVKDSNTMLVVDKIAASGVEA

SEQ ID NO: 296 - protein, 188 aa, Listeria monocytogenes
MRIYTKTGDKGMTRIIGGSKVSKDNIRIDAYGTLDELNSLIGYTITTLGAEPEIQAELEQIQQQLFDAGGDLATEEGKRAYKLTSEPVAWLEDRIDIYADEPPEIEKFILPGGTQAASLLHMARTVTRRAEREIVGMLKIASSNEEVLKYVNRLSDYFFAVARVVNYRAGETDIFYKNSELVFRNKKK

SEQ ID NO: 297 - protein, 441 aa, Listeria monocytogenes
MSSKNKQSFMNRFIAFMEKYFEPVAARIEKQRHISSIKNGMIALISVLIIGSFSLIISAIGNMFPAGSVVKEFFVQNAAALNLPFQFTFGLLSIYAAITISYSHAKQMKVPVLHSVMAAVMVTLILNTKMVDGVLNTEFLDSRGLFIAIFAALISVELIGLFIRKNITIRIKGLPAGIATTFEAIIPLVVLLFSAVGLSILMQSVTSGQIIPEAFTTMLAPAINSIDTPYAVFLICFLEMLFWFIGLNGYAILIGFVLPFMTQYLGANAAAYAAGEPIPHVFAPNFWDYFMGFSGSGITGALVILALFSKSRELKAVGKVSVVPAIFTISEPVVFGLPICFNPYLFIPFVLGTPILAVGQWFVFHFGWVRPPIANVGGTPIPLAQYLATMDWRAIILIIFVLAAAVCMYYPFFKMYEKSLIKEEEVVSERQAAHDALDLDF

SEQ ID NO: 298 - protein, 111 aa, Listeria monocytogenes
MEINQLHVLLVCNLGASTGVMVTKMKEIAQNSEKLTNTDVKIEAHPAGELREHIEDFDVILVGPQIKHQLKHLSEIAAEYNKPIQVIDTKDYGTVNGANILKDAIILKLNK

SEQ ID NO: 299 - protein, 109 aa, Listeria monocytogenes
MDIEKISFSLISLAGDSFSKLIEALQAAKESDSELVEQLLKEADDLMIEAHKVQTEMLIQETRGEQANFSVLLVHAQDTLMNTILASTLIREMIEMHQEIKTLRKEEEK

SEQ ID NO: 300 - protein, 672 aa, Listeria monocytogenes
MKLNQQCIQILDFLMEQEDFKNIGYISNALGCSERSVRYSLEKIDIFLHEQTLPALIRHTRKGVLLPEKNIVNPVVRKFKQQITPKKYRYSQEEVQQFLLLKLLLSEEVLPVTYFEEVLFISRSSVLNHLRAIEGELFLNNLDLSHQPRHGFLVTGNLITKTSLFARSFLRFINIREFYQFLDSENSLSKKGELFFYNLFELEILQEVNREAHSVEENMTRAMDEQLYLTLIAILLKQHEAKVDFQFTADFVAVDELDKALEIIIGSLKQYQYGREDEAVIEAFVTGICEKMGEIYQVDFVHGDTDFYTQIKAHIKLMIRRVRAGVIIENPIFNEFMRDNREIFMRVKESLEALKPLLPISVSSQEISFLAIYFASEVQRNKQTVEMKPNLLIICPEGVAVSKMIAIQLKRMFEFESIQTIGLRKFKRAMMNDFDFVISTVDLPDMQDTKVLRIHSYLQKEDMELLQKHLRMKLVKSDKQIINKFSKILAIIGENTQITNLSKLEFDLLEALISDEGETPKRLIPTFEFTEEAIVMEETCPTWRQAIKLGTKRMEQLKVIEPSYHEKIIHNLKVYGPYMVIAPGVVIAHAGASDGVLMDGIGVTIIEDGIMFFDRYEEPVHVIFTLALKTKEAHLIVEQLMKLALNEEKMQKIKMASSKRDIYHYVKSAIFE

SEQ ID NO: 301 - protein, 388 aa, Listeria monocytogenes
VDMKKVNPNLTLLALAISAFGIGSTEFISVGLLPLISSSMGVSISTAGLTVSIYALGVMVGAPVLTTVTAKMNRKNLLLLVMLVFLIGNLVSAFAVSFGMLLTGRVVAAFAHGVFMSIASVIAADVVHPSKRASAIAVMFTGLTVATVTGVPLGTFIGQLFGWRMSFLFIVAIGVIAIIANFFLVPKNLSNGKSISFKSIGQLLVNKKIVMVLLMTAFGYGGTFVVYTYLSPMFSGMGYSTSMIVILLIVYGVMVAIGNTIGGHFANERPAKALFIMFSLQGVTLLLLQFTSGNAILGLMTIMLMGFFAFMNVSGLQLYVVQLAERYLPETVSMASALNISAFNIGIALGAFIGGLVAEYIGLSYTPIVGFLMVFIAIILTFYMKKDK

SEQ ID NO: 302 - protein, 117 aa, Listeria monocytogenes
MTKVYNIGVEATLEVIGGKWKPVILCHLREGKKRTGELKRLIPNITQKMLTQQLRELEKSGVIIRKVYEQIPPKVEYSLSEYGESLSEILNKLCLWGENHVDLLLTKNEDIVLLKRD

SEQ ID NO: 303 - protein, 103 aa, Listeria monocytogenes
MTLSKEQIKATKSEFAENLALADLTIVEVAKELNTSQVKIERIFNLKQRSLNDGWILRNYLLRKVTEVGKTPVPFTALSGDYHGYWFLDGEEIDSGILSKGNH

SEQ ID NO: 304 - protein, 332 aa, Listeria monocytogenes
MKIITIEEHFESEVITNEINKVTGNLVSGQVNPEMFQYMQKELPSAAEMQDTEKRLGFMDQHGIDMQVLSYGNSSPQNLDPKISVSLCKRANDELAKVIQQNPTRFSGFAVLPVGSPEDAAIELKRAVEELGFKGALVKGQFENKYFDNSFYYPIFEMAEKLDVPISFHPSFIPETITEQYFASDAWSDVVTGVFSSAGFGWHMDVGIQVVRMILSGIFDKLPNLKIITGHLGEMVPMFLERMDDTLGHWTTLEHKISDYYRTNVYITPSGLLYRNEWKFLLNELDENHLIYALDYPFVKPENAGTFLDMLDLTDEVKAKIAHKNAEKLLHL

SEQ ID NO: 305 - protein, 185 aa, Listeria monocytogenes
MNNYIKVHQPLNVDLRTQKTQTKLYTVLERFYLEGRTFESISIKDLCEQAQISRATFYRHHEEIIQIIEVQILRTMQYFSLEFDQIILTKENIQRLILRSIQKNPLLFQAIFWSRAENIFLDVVSGEILRISLLKEISFSDSNFIPNCFARMILSLAAEIQQSNKDYTNGQLVELIQEAARFLQK

SEQ ID NO: 306 - protein, 162 aa, Listeria monocytogenes
MKMKILTVNAIIAALYVVLGMIVAPIGFMALQFRIPEIFNHLIVFNKKYFWGIIVGVFITNLFFSGLGWIDLVFGVAQSAISLLLMIGISKYVKGIIPRMIINTILFSVTMAIIAWELVIVFDLPFLITWATTAASEFIVMGVGIPLMYLLNKRLNFRKMID

SEQ ID NO: 307 - protein, 520 aa, Listeria monocytogenes
LTKFSEFGLDEKIVKSVNRMGFEEATPIQEKTIPLGLEGKDLIGQAQTGTGKTAAFGLPMIHKIDQKSNNVQALIIAPTRELAIQVSEELYKLSYDKHVRVLAVYGGSDISRQIRSLKKNPQIVVGTPGRILDHINRRTLKLDHVETLVLDEADEMLNMGFIDDIETILKEVPAERQTLLFSATMPDPIRRIGERFMHSPELIRIKAKEMTALLIEQFFVKVHEKEKFDVLSRLLDVQAPELAIVFGRTKRRVDELSRALDMRGYVAEGIHGDLTQAKRMSVLRKFKEGKIDVLVATDVAARGLDISGVTHVYNYDIPQDPESYVHRIGRTGRAGKEGMAITFVQPREMGYLRIVEETTKKRMQPLQAPTWDEAFAGQLRVATEKIQEAITEENLADYKTFANELLEKYDATDIAAAMLKMLAKEPDKTPVHITEERPLPSRGGGGYKGKNGKGGKGGGYRGGSGKGGSYRDRNNSGKGRRSGGGSGGGSGSGGGGNRDRRGGGEQRSGGNKGNYSQKSK

SEQ ID NO: 308 - protein, 557 aa, Listeria monocytogenes
MTWKHYLSAWQNADLSNEWRRELQRVEEEQERFDGYLTFGTGGMRGKMGIGTKRINLFTIRRVAKGLGDYVVANEGAEMGVAIAFDSRHHSGAFAQETAKVLAAQGINVYLSDSIRPTPALSFCVREKGAFAGVVITASHNPSIYNGFKVYDKNGCQITLGVAQEIAGYLEKITDIFTIPVRELPNPLVTPLGKEMDDAYLNALTAVVSRPDLLADYGNELRICYTPLHGAGKELVMRGLLENGFSETTIIAEQSEPDGDFPTVISPNPEEENSFDLAKKLAKEIQADIILATDPDADRLGVAVLNKQATYQILTGNQLGALLLNYILEAKTPVTGADTMINTIVTGDLGGKIAYDFGINHIQTLTGFKFIGEKIAEMEGTEKNFLFGYEESYGYLIAPFVRDKDAVQAALLTAEMALFYKKEGTTLLGKLTNLFEKFGYHKEYLHTITLDDSDGITKMIQVIDALRKEPIFMPEITVVEDFLTSKRTNFVTMEVTNIELPKENVLKFYLMDSSWFAIRPSGTEPKCKIYFQTSGETEEIATKAMNELRKRVLAVWD

SEQ ID NO: 309 - protein, 355 aa, Listeria monocytogenes
MNIYRYEENPLITPLDVKPIHEGFEVIGAFNAGVAEYNGEVLLLLRVAEKPVSENPEVVLAPVYNATSNELELQPFRLDDENYDFEDPRMIRSKAKLEGFSYLTSLSYIRIARSKDGHQFTLDEKPFLYPFNEYQTFGIEDARVTQIGDTYHVNFSAVSEFGVADALVTTKDFENLEYQGNIFAPENKDVLIFPEKINGKYYALHRPSLKSIGNLDIWIASSPDLRSFGDHRHLLGIRPGEYDSGRVGGGCVPIKTEEGWLILYHGATEENRYVMGAALLDLNDPTIVLKRTKTPILEPVADYEKNGFFGDVVFACGAIQEGDTLHMYYGVADTSMAGCDMKISEILHQLEVENK

SEQ ID NO: 310 - protein, 304 aa, Listeria monocytogenes
MNTIENLLQVYRENSAAFGTRITLNGAGDKDVYNITAPFHWLGQEYIAGRVESRDSEFSEVRFFEKTETDKYQLVENTTVLALQDPFVTFVQGELIIGGVEVFPKETDPTMLDWRTNLYRATSLTNFKQILAGPIGMKDLRIKELADGRILVLTRPQGEKGGRGKIGAIVMDSLTELTIEKIEAAPLLKRNFSGEEWGGGNELHLLEDERIGVLGHIACFDEAGNRHYYACSFQLNEDFSQIEQEKIIAERANFAPSEPKRPDLADVVFSGGLIRNPDGTATLYAGIGDSDAQKLAIPDPFKNN

SEQ ID NO: 311 - protein, 510 aa, Listeria monocytogenes
LEFWRRSVFYEIYMKSFQDSNGDGLGDFKGLTSRLDYLVDLGIDGIWLTPFYPSPQVDNGYDVSDYCDINPDYGDMTDFRAFMKAADARGIKVIIDLVLNHSSTEHTWFKESRSSKTNPKRDYYIWREKPNNWESFFGGSAWEKDELTGEYYYHSFAKEQADLNWANEAVRAEMEQVLAFWLNEGVAGFRLDVINNLTLVLEFPDNPVASGEMEHVYDRNQSGLEQALEDIASFCRKERDVFLVGEISSDKLPEIARYSSKKMLDVTFNFNFGSVDQLDAKSVFTTLNEMETALNEGQWPTLFFGSHDMSRFRSRLASGDIVKTQLLAFLMLTAKGVPFIYYGEEVGMPDLTFSSVKEMRDIQGTAAYYQALQTGTDEKQALEIAIEKTRDKARGPMIFPDGKPFTLGEPWIKMATLPEEEARMMWDFYQALLAFRKENDFKEMEYTFLKLDGEVLSYQRGEFIFLLHFGEEEITYPLQGNYQLVFGEAMMVENGIRMGAHTGIALRVEE

SEQ ID NO: 312 - protein, 277 aa, Listeria monocytogenes
MVGHNSKAGKIVRYILTTLLMLIMIYPFIYLVLNSFAAWDQVDKKLIPTEFTTRSWDWLFGNSVVAAPAPWIHAFINTIIVSTIATGLMLLFGLMVGYALAKVDFKGKKIVNNAILFQMFFPAIILLIPQFLMITDFGLLDTYAGMIIPTMLSLWAVFMYTNFFKAIPDTLIEAAKLDGASDLKILFRVVLPMSKSITTVIFLFLFTDRWTNLLWDMLVTKSDGTVTLNVLISQMFGPYATYPGPMYAASVLLTLPLIILFLFFSKKFQEGMQFTLK

SEQ ID NO: 313 - protein, 292 aa, Listeria monocytogenes
MKRRNNKLGWSFTSPYLIFTAIFFLVPLVWSIWLSVTDWNMMSPEINFVGFDNFIKAFTSPAVQAAFFVTYKFLIVFVPMALIISMIVAVLVNGLPKFKGLYLVAFFLPYLSSGVVTSLIVQGLLSYNSALNVFLRGHFGWDIDWLGTPMSALVIISLMIAWKMSGYYALILISGLASINHEIYEAAAMDGSGRFRTFWKVTVPMLYPALFTVIVLAVGVSFGIFTEVYQLTGGGPNFATNTWQMEIFNQAFVNLNSGYASAISLMAATVTFASIGVIKKMLEKWGQRNGWT

SEQ ID NO: 314 - protein, 439 aa, Listeria monocytogenes
MKIRKIAIAALSVVVAGSLLTACGGGNSKSDDNGKTKVTFWAAPNPTQVKYWDEMAKAYEKENPDVTIEVSQMKESPSSEATIQSAIASKTAPTMSENINRSFAAQLADSKAIVPLNDVKGLDDVVKERNMSETMDSWKFSDGNQYVLPVYSNPILFAWRLDTLKELGYDAPPKTYSEALEVGKKLKAKYPDKVLWAKGDLSDPTAWMRWFDFFPLYDAASKGNAFVEDGKLVADDKAGTELLTFMSELQKNKLLLASKATDPFETGTSIMADNGPWTFPNWDEKFPELKYNENYAITAPLVPDSMVNEENVATYADSKGVVMYAQATDKEKEAAMDFLKFVYNDDKNDLKFLETTNLIPARDDATENETFTAFFKENPELEVYAANVPYSIPAMDDAKYNDIQQIIGEEAWNPIVRGEKKPTKAWSDMKKAEDGVLQE

SEQ ID NO: 315 - protein, 267 aa, Listeria monocytogenes
VKQIIEVLKEQFKYAPMIFRIARYEDKATYQSHYLGLAWQVLNPLIQIAIYYFVFGFAFNSSSGSNASYIEWMLAGIIPWFFISGVILQGANSIYNKINMVSKMNFPMSILPSINIASNLTSYFTMMVLLVGLFAVKGTPITIYWGQYLYYFVAMIAFLYSFTLLNATISVLVRDYYIMLQSLIRVLFYMSGVVWDLQTKLPEWAFNILKLNPIYYLINGFRETFLMEKMFWENPSYTVYFWLLTGVLLFVGASLHMKFRERFVDYL

SEQ ID NO: 316 - protein, 299 aa, Listeria monocytogenes
MKWFKGIAVVLLLAILTACGNTEVKETTKQTEEIKVKDATGETITLKKAPTKIVSLIPSNTEILFALGLGDEVKGVSAYDDYPKEAQKIEKVTSTSVDTEKIIALKPDLVLGHESMLATEKDAYKILTDAGINVFVVPDATNLKEVEKSIATIGDLTGTEKEATKVTDSMEKQKVAIEKKAKELKTSPKVWIEISPDLYTAGKGTFMNEMLELAGGTNIVTESGFIPYNEEKVVELQPDIILSVYPDAKSTIQKRAAWKDIPAIKNDKIYEMDANKLSRPGPRLLEGAADIQAVLEKNN

SEQ ID NO: 317 - protein, 1146 aa, Listeria monocytogenes
MNRIKKVLVANRGEIAIRVMRACTELKIKTVAIYSQEDTGSFHRYKSDEAYLVGAGKKPIDAYLDIENIIEIAKESGADAIHPGYGFLSENIEFARRCEQEGIIFVGPKSKHLDMFGDKIKAKEQALLADIPVIPGSNGPVAGIKEVEEFGEKNGYPLMIKASLGGGGRGMRVVESKEHVKESFERASSEAKAAFGNDEVYVEKCVMNPKHIEVQILGDTHGNIVHLFERDCSIQRRHQKVVEVAPCNAITSELRNRICDAAVKLMKNVDYINAGTVEFLVEGDDFYFIEVNPRVQVEHTITEMITGIDIVQSQLFIADGYALHDQLVAIPKQEDIHIHGSAIQSRITTEDPLNNFMPDTGRVDTYRSTGGFGVRLDAGNGFQGTVVTPFYDSLLVKLCTWGMTFEQATRKMRRNLIEFRIRGVKTNIPFLLNVVRHPDFASGNYNTSFIDTTPELFKFPHIRDRGTKTLRYIGNVTVNGFPGIKHRDKPVYAEPRLPKIPYGSQISPGTKQILDAKGPEGVVDWVKKQEEVLLTDTTLRDAHQSLLATRVRSKDIFQVADAMAHLLPNMFSFEMWGGATFDVAYRFLNEDPWVRLETLRKQIPNVMFQMLLRGANAVGYKNYPDNVIREFVKQSAQSGVDVFRVFDSLNWIKGMEVSIDAVREAGKVVEAAICYTGDIDDDTRTKYTIDYYKDMAKELVAQGTHILGIKDMAGLLKPQAAYRLIGELKDTVDVPIHLHTHDTSGNGIYTYAAAVSAGVDIVDVASSAMSGATSQPSMTGLYYGLVNGNRQTNLDAQNSQIINHYWEDVRHYYKDFDNALNSPQTEVYIHEMPGGQYTNLQQQAIAVGLGDRWDEVKEMYTVVNQMFGDIVKVTPSSKVVGDLALFMVQNELSEEDVYEKGDTIDFPDSVIEFFMGEIGQPYGGFPEKLQKLVLKGRTPLTDRPGALMEPVNFVDVKAELKEKMGYEPTEKDVISYILYPKVFLDYQDMINKYGDVTVLDTPTFYKGMRLGETIEVELEKGKILLIKLNSIGEPIADGTRVIYFELNGQPREINIQDMNVQSTVIARRKIDTTNPEHVGATMTGSVIQVVVKKGDSVKKGDPLLITEAMKMETTIQAPFDGEVSSIYVSDGDTIESGDLLIEVNRI

SEQ ID NO: 318 - protein, 400 aa, Listeria monocytogenes
MFKRILKSYDYAFIAVFIVLCLFGLIMIYSASWSLAIGKGLPADYFYARQVKNFIISFIFFILFALLPFKFYQNNKVLMLIVFGSIGVLLLIFLVGKTVNNANSWLVLGPRSLQPGEFAKLAVIIYMSAIYAKKQSYIDDFNRGVLPPIFFLAFVCFLIAIQPDTGTAFIIFLVGCCIIITSGMRLRTIMKLIGIGMGIIIGLTLILFALPDSVRNEIVSPTKVARITTFMNPFEYADKEGHQLINSFYAIGSGGVSGQGLGESVQKLGYLPEAHTDFIIAVVAEELGVFGVMFIILALFFIIFKTITTGLRAKDPFASLMCYGIASLIAIQAFINLGGASGLIPLTGVTLPFISYGGSSLMVLSMMLGIVANISMFTKYQRVYKADGSTKELPKKQKRR

SEQ ID NO: 319 - protein, 93 aa, Listeria monocytogenes
MANKKIDHREEAVELLKQDAKRILQLIKVQMDNLTLPQCPAYEEVLDTQMYGLSREINFATRLGLIEPEEGKKLMSTLEKELSTLHELSMSKK

SEQ ID NO: 320 - protein, 80 aa, Listeria monocytogenes
LNAKCILCERVDELDNREFKTKQLRNKPIRMYLCPECEHRVAINTISRVNSGHFNFHKPVVISNSELKNMLEHNKETISE

SEQ ID NO: 321 - protein, 286 aa, Listeria monocytogenes
MKKWMVIISIISLVALLGACGNNDNEKDQEDKSTTDSTTKKAKSSSNESNKAAETKENDTNDKAATTDKGSSNPTKEEKDTSTTTDTPKKETPKSPAKTEAFSFSPSGFKVSTVESILGGDVTTTYLSSSKSFQKDFEALTLFINQYKVEHVINPTKEVSASNPESYLANKNGYVITLDISIKNNSKKDKMYKADQISLLGASKSVGGSLDNFIPSGFHLIGSSSDPYNFTAGKTARGLLTFTMDEATYNDLAKDSQIGVPDPSRFDSSSTKGSSQDNVVAPFPIK

SEQ ID NO: 322 - protein, 612 aa, Listeria monocytogenes
LNLRNDIRNVAIIAHVDHGKTTLVDQLLRQSGTFRDNETVAERAMDNNDLERERGITILAKNTAIKYEDTRVNIMDTPGHADFGGEVERIMKMVDGVLLVVDAYEGTMPQTRFVLKKALEQNLTPIVVVNKIDRDFARPEEVVDEVLELFIELGANDDQLEFPVVYASAINGTSSYDSDPAEQKETMKPLLDTIIEHIPAPVDNSDEPLQFQVSLLDYNDYVGRIGIGRVFRGTMHVGQTVALIKLDGTVKQFRVTKMFGFFGLKRDEIKEAKAGDLVALAGMEDIFVGETVTPFDHQEALPLLRIDEPTLQMTFVTNNSPFAGREGKHVTSRKIEERLLAELQTDVSLRVEPTASPDAWVVSGRGELHLSILIETMRREGYELQVSKPEVIIREIDGVKCEPVEDVQIDTPEEFMGSVIESISQRKGEMKNMINDGNGQVRLQFMVPARGLIGYTTDFLSMTRGYGIINHTFDSYQPIQKGRVGGRSRGVLVSMETGKSTTYGTMQVEDRGTIFIEPGTDIYEGMIVGENNREGDIAVNIVKAKQMTNIRSANKDQTNVIKKPRHLSLEESLEFLNEDEYCEVTPESIRLRKKILNKNEREKAAKRSKTAE

SEQ ID NO: 323 - protein, 257 aa, Listeria monocytogenes
MDSEKIDYLARLWIMEAAAKIKQSFKETLDIDVKSGRNDLVTNMDKETEAFFVQQIKDHFPDHCLFGEEGMASDVTDLDGVVWILDPIDGTLNFVEQQRDFAISLAVYEDGIGRLAYIYDVTRDELYFGEKGKGATVNGRTIPKLDPAIDLKDTLLIANLSVTRKFPTMWEAVKVSRGLRLHGAASLEYMDVATGRAGAYLSANLAPWDIAAGKIIVEELGGKVTRINGEKINMLEKGSSIVASPKIHQTLLDNYLP

SEQ ID NO: 324 - protein, 204 aa, Listeria monocytogenes
MTFKGFSKKDFKTMQISGLEARMTGIQNDIQPKFRAVGEELTTYLSAKLGDEMFLHIARHQRRSVNPPDSTWLAICHDKRGYKKHPHFQVGLFDKYLFIWLAFIYENEESLKIANRFLKEKKLLADLPDNFAISPDHTEEKTYPVHDGQLEATLERFRDVKKGEFLVGKIYLPDDNHLSPAKDFIKEAEMVLDELIPLYKAALQ

SEQ ID NO: 325 - protein, 314 aa, Listeria monocytogenes
MHQIFKSDENGKLIELEEVTRNCWINIVAPTSEEINKIADNYEIPLEFLEDPLDKDESARIERDDDSDSVLIVCDFPVVDEDDIHYASFETIPMGIIITKDYFITICTIDSSIVQSFIRNRIKGFYTHMKTRFALQILYMISTTFLRHLKRLNRQTDEIEKELHESMKNKQLYDLMGIEKSLVYFVTALKSNKVVLDKMMRQNIVKMYEEDQDLLEDVIIENRQGIEMAEVHSNILSGMMDAYASIISNNMNIVMKFLTSFTIILTIPTMVFSFYGMNVKLPFMNTPMAWMLTLGFAFGIAGALAIVFWRRKFF

SEQ ID NO: 326 - protein, 222 aa, Listeria monocytogenes
METNLELQDITYQYDSGNKAQIVLRNLSYTFSEGTFYTILGPSGAGKTTLLSIAAGIDKPTSGKLIINKKVLNETMSLQSYRKSLSSIIFQTYNLIPYMTAVQNVYTAMGIQHSQMKDKRKRAIELLKEVGLTDKQINSPVLKLSGGQQQRVTIARALSGNAPFIFADEPTGNLDHETSEHIIDLFRDLAHKKNKCVVMVTHDNHVASRSDVILNLKGKTLI

SEQ ID NO: 327 - protein, 473 aa, Listeria monocytogenes
MDFIRRAFISINAKKGKSLVLFTLLLVIFSLVFTGFAIQESTKQSAESARKQLGANVTLQMNQEEIMKKAQSGEEIKEEDLSIPTEDVNKIKKLPQVDNYTISSEGSASKGDLTPIPAKKQEGGQGGMTQVAGTDTNGKKVETPSFSVKAVNQTATLNSFKDKTDKIISGKPLTSDDKENTALIEKQLAKKNNLKVGDTFQLTNDKKKKVKFVVKGIYQSNQKIEPQLESFQMMLPGNKIYANIKGAKDFLWSGGIEKAEFNLKDPKEINSFISEAKKLTDVDNGDMFQFDAQNSAYKKMIGPIERVASFSNIIVMITLLAGGLILALIVLLSIRERKFEMGVLLSLGESKTKLMSQFLVEVLIIAALAFSFSCALANPIGQAISNQMLSTEVTKEANKENETSTQESMAIALGGEEKTKVDAEPIDKIDVVITSNIMGQVGGLGFILIFLATTIPCLFIIRLQPKMLFTQKD

SEQ ID NO: 328 - protein, 481 aa, Listeria monocytogenes
VLAIKWMNKVRTRISWKIFLIFVSIILLFTALVYAMLIFFLPQFYYDYKIKQINDYANEVVKAGEADDIEGVEKALNDFMENTNILPILIDSNGNIVYIPNVNMASIKSATSTVVDGTKAEGGTTATDYSGGTETKNKPISINGQTYNLTYTINIQKINDISTVLLQFAPYFILFAFILSLLTAYFFSRRMVRPLLRMNKVASKMANLNFTEVLPITSKDEIGQLSGNLNEMAINLEKTMLELNEVNKKLQKEIEKERQLEEMRKSFVTAISHELKSPLAAVMGQVEAMRYNVAPYDNHPKYLQESYQILEKMSQMIQEMLDVSKVDQTNYMIEKTSFSLTEMVEKIIYSKKMVPHRLSQKVVFQVKEDVTVTANYAFIEKAIENIFENAFNYSKEETTILVEIQNREKGFYFSVHNKATSIPEEELNKLFEPFYRLEKSGNKKTGGNGLGLFIIAKFLDIQRIHYKLINEKDGVTFQIWQ

SEQ ID NO: 329 - protein, 220 aa, Listeria monocytogenes
MEKILIAEDDSAILGVITAFLTEAGYQVMTAKNGIEAYHLFQKETFDLIIMDIMMPSMDGYTLTELIRSTSTTPILMMTALSEEDDELKGFDLGADDYIQKPFSYLVLLKRVQVLLRRVNQSETKKQILRCGNISVDTETFEVISAGETIELTKKEFDILVLLIKNQKKVITREMILSQAWDFAAIVDTSIINTHMKNLRKKLHTEKIQTIRGAGYKMDE

SEQ ID NO: 330 - protein, 176 aa, Listeria monocytogenes
MDISQIKAEVVTPETGIHVGEKAAPVKVMSFVNLRCPFCREWNEKSKDVLTEYIQAGKIELIIKPFDKEKESLQRGNVTHRYLDYSTPEKTRETINKIYSKQDEWGSLSLDEVATYMESELGLTEQDNKAASEKIVAEANAANVVFVPTVIVGEHIFDEHISPEELRSLLDDELAK

SEQ ID NO: 331 - protein, 90 aa, Listeria monocytogenes
MEYSYPLNPDWTTEEMTIVVQFLEAIERAYEKGIDTLELKEKYRAFKQVVPAKGEEKRIGIDFEKASGYSAYKVMQLVKNATTSKIKMQP

SEQ ID NO: 332 - protein, 317 aa, Listeria monocytogenes
MPSKKKKIVVIGRSNLQNLYIHTVLLKKLPAEIYLIDDQAKTSVQDFDYASYYHADVTIHSGTFNECRNADIVVFFQEEMSNQIVSKEDNVALIIEKVKKMMATGFRGIVLVATAESNVVAALIKRFSGLSANQIITLGTMLATSYFQVEIAKLFKISPKNVHGYIIGDNAEDVIPVWSRAFLGGKPILSYLAEDQKRISAEDLQNLTKMITKIPDFPFENKDGCTFRFSTVTVLAELTEVILRDEARVITVGVEVKEAYGLENPVFISVPAVIGAEGVRELLELNLSDDEQKELKQIAAKTTEKLEELQLNKGGIS

SEQ ID NO: 333 - protein, 103 aa, Listeria monocytogenes
MEKQTATWKKALFWFAYVVAGICFVLTIVAFGVGFFHHMHDTGGWRSVIQILETPITGFVKMTGGYIGKGILEVIILIIVSYVLPIFFCFATHYLKVKRREMT

SEQ ID NO: 334 - protein, 467 aa, Listeria monocytogenes
MVVGDFPEERDTIVIGAGPGGYVAAIRAAQLGQKVTIIEKEYYGGVCLNVGCIPSKALITIGHRFKEAGHSDNMGITADNVNLDFTKAQEWKGGVVNKLTSGVKGLLKKNKVEMLEGEAFFVDDHSLRVIHPDSAQTYTFNNVIIATGSRPIEIPGFKYGKRVLSSTGALALTEVPKKLVVIGGGYIGTELGGAFANLGTELTILEGGPEILPTYEKDMVSLVKRNLKSKNVEMVTKALAKSAEETENGVKVTYEANGETKTIEADYVLVTVGRRPNTDEIGLEQAGVKVTERGLVEVDKQGRSNVSNIFAIGDIVPGVPLAHKASYEAKIAAEAIAGEKSENDYTALPAVVFSDPELATVGLTEKEAKEKGFDVKAAKFPFGGNGRALSLDAPEGFVRLVTRKEDGLVIGAQVAGMNASDIISEIGLAIESGITAEDIALTIHAHPSLGELTMEAAELALGRPIHM

SEQ ID NO: 335 - protein, 544 aa, Listeria monocytogenes
MAYSFKLPDIGEGIHEGEIVKWFVQPGDKIEEDESLFEVQNDKSVEEITSPVSGTIKEIKVAEGTVATVGQVLVTFDGVEGHEDDAEEESAAPKAESTESTPAPAQASGKGIFEFKLPDIGEGIHEGEIVKWFIQPGDKVEEDQSIFEVQNDKSVEEITSPVDGTVKDILVSEGTVATVGQVLVTFEGDFEGEASHESTPESPAEDAALANNDATSAPATGGNGTPSSKKDPNGLVIAMPSVRKYAREKGVNIAEVAGSGKNNRVVKADIDAFLNGEQPAAATTTAQTEEKAAAPKAEKAAGKQPVASSDAYPETREKLTPTRRAIAKAMVNSKHTAPHVTLMDEIEVTALMAHRKRFKEVAAEKGIKLTFLPYMVKALVATLRDFPVLNTTLDDATEELVYKHYFNVGIAADTDHGLYVPVIKNADKKSVFQISDEINELAGKARDGKLTADEMRHGSATISNIGSAGGQWFTPVINYPEVAILGVGRIAQKPIVKDGEIVAAPVLALSLSFDHRVIDGATAQKAMNNIKRLLNDPELLLMEV

SEQ ID NO: 336 - protein, 325 aa, Listeria monocytogenes
MAQKTMIQAITDALAVELEKDENVLVFGEDVGKNGGVFRATEGLQEKFGEDRVFDTPLAESGIGGLAIGLALEGFRPVPEIQFFGFVFEVMDSVAGQMARMRYRTGGTRNAPITIRAPFGGGVHTPEMHADNLEGLMAQSPGLKVVIPSTPYDAKGLLISAIRDNDPVIFLEHMKLYRSFREEVPEGEYTVEIGKAAVRREGTDVSIITYGAMVQESMKAAEALEKDGVSVEVIDLRTISPIDVETIIASVKKTNRAVVVQEAQKQAGIAANIVAEINDHAILSLEAPVMRVAAPDSVFPFSQAETVWLPNHNDIIERVKEVIAF

SEQ ID NO: 337 - protein, 371 aa, Listeria monocytogenes
MASKTKKAIIDVKKQFEAVHKQFELVQILNEKGEIVNPDLMPDLTDDQLVELMTRMVWTRVLDQRSISLNRQGRLGFYAPTAGQEASQLASHYALEKHDYILPGYRDVPQLIWHGLPLTKAFLFSRGHFVGNQFPEDLNVLSPQIIIGAQIVQAAGVALGLKKRKKDAVVITYTGDGGSSQGDFYEGMNFAGAYHAPAIFVVQNNKFAISTPREKQSAAETLAQKAVAAGIPGVQVDGMDPLAVYAVTKFARERAVAGEGPTLIETMTYRYGPHTLSGDDPTRYRTKELDGEWELKDPIVRFRTFLEGKGLWNEEKENAVIDQAKEEIKVAIKEADATPKQTVTDLLKNMYETPTAPIKEQLAIYEAKESK

SEQ ID NO: 338 - protein, 183 aa, Listeria monocytogenes
MLTMDDIVREGHPALREVATEVTFPLSDEEKKLGRDMLEFLINSQDEDLAEKYGLRGGVGIAAPQLAVTKRFLAIHVHDEKDRLYSYVLYNPKIRSHSVQQACLSGGEGCLSVDREVPGYVVRSERVTIDAFDENGTPLKLRFKGYPAIVIQHEIDHLNGIMFYDHINKENPSYLPPDVDVFG

SEQ ID NO: 339 - protein, 184 aa, Listeria monocytogenes
MKQRVETEKFYPAYPVFVLTYLNEIGEPQMSTGSSSYTLGDSIVIGVSAESNAGKHLHAGQKFAVNFPNTEQLGLIEQGGFSSGKRNDKIKVHQIELTKSDSGGVAYIDVCPIVLECTVIQTVSDMDYHTIFAKIDSRLFEKNLVDSEGHFIHEELDLVLFSGDANERKFRQLDAKIETIGGHS

SEQ ID NO: 340 - protein, 332 aa, Listeria monocytogenes
LERYDRQMRVKNIGKDGQEKLLTKTILIVGVGAIGSYAAEICARMGFGKLILIDRDYVELSNLQRQSLFTEQDALDKQAKSYAASKALQLINSDITIEYIVDDANVTSLTPYVGTIDYILDCTDNFMTRDFLNQFCFSHQIPWIFTSCAGNYANLMPIIPPDSACLHCLLGDIPQTNAASCDIIGVDGALIPIVAGMQVSLLTQMIINPDFKANTYYQLDNWHFSFQTIEVKKRPDCSSCAPGKMVSEVPFSGQTVTLCGRDTVQFRLPNKSNYREIKLLLTEQKIIYNENPALLSFQYEKFQFVIFKNGRVLLHGSENIAEAKKIYHLFFN

SEQ ID NO: 341 - protein, 162 aa, Listeria monocytogenes
MEQKTFIKVTCSILTISDTRNLDTDTSGQLIQSALETAGHEVISRVVVPDDVTLIKQKINELAANGSFCLITNGGTGIARRDVTYEALFATIQQEIPGFGEIFRMLSYEEVGSRAMVSRAFAGFSESGLLLFALPGSSNACQLAVQKLIIPELPHLIAERQK

SEQ ID NO: 342 - protein, 333 aa, Listeria monocytogenes
MQLLKDKFGRVHDYIRISVTDRCNLRCVYCMPEEGLTFLPHEKVLSKDEIVSFMELMVKFGIKKVRITGGEPLLRTDIVEIVRGLGAIPEIEDISITTNAMYLAKKAEALKEAGLTRVNISLDSLHADRFKAITRGGRLQKVLDGIQKAEEVGLFPIKLNVVLIKGQNDDEITDFLRFTKDKDINIRFIEYMPIGHAGTSWKEKYLPLDTIFEACNEAGYEYEPVDSIRGNGPSENFRIKGAKGTFGVIHPVSAHFCDSCNRLRLTADGYIKACLYWDEEMNIRPFIQDPVKLMQLVQKAIDNKPENHEMALKLQDEVQSNKPTWRRMSQIGG

SEQ ID NO: 343 - protein, 160 aa, Listeria monocytogenes
MEKDDLTHFNDEKRAKMVDVTSKSETKRRAIASATIHMNEETLARIHAGKIAKGDVLAVAQVAGIMAAKKTSELIPMCHPIMTTKADISFEDDGKTALTITSEVVTVGKTGVEMEALTAVTIAALTIYDMCKAMDKGMRIEKTYLVEKTGGKSGTFKAEA

SEQ ID NO: 344 - protein, 82 aa, Listeria monocytogenes
MLTTVKFFAFLAEKTHKTEVKLNLQQCQTVGEVREVISSEFPEIAVDLATCMLAVNMEFQQDQDFLPEEITEIAVIPPVSGG

SEQ ID NO: 345 - protein, 140 aa, Listeria monocytogenes
MRYVALQHEKIEIGPLSEKLINKNHGGTNLFVGTIREWTGDIQTEEIRYTSYEEMALKELNKLATEVEAKWGADVVIVHRLGLLQITDIAVVIGVSTPHRAACYEGSRYIIERLKERVPIWKEEKDVDKTRWGGINAHNS

SEQ ID NO: 346 - protein, 161 aa, Listeria monocytogenes
MAAILQIIGFKNSGKTTLLNALIRASRKENYTVSAIKHDAHDFSVDHAGTDSYSFQESGAEAVVIANSRQYAVMEQTGIDLKTAIQKLPESDIVLIEGYKEGPFPKIILVREQAEIELLKNSKAVHKIATHNPALKKEAIFIGEENALNLFAETLIKEFLK

SEQ ID NO: 347 - protein, 407 aa, Listeria monocytogenes
MIEKRNTIRMEQAREVLCNQITHLPVEKKHVTEALNQVLQEPIFAPFPAPYFRRSGYDGFAITEVDDGNYPITLRVVAEVPCGETYDKPLKPGETVRIMTGAKVPDNASKIIMLEQSREADNENEIILINTQKSSNITEIGTEFAKGDLLLDRGHILNAGSISLLSSFGIQEVQVIRKPKVAILSTGSELVPAGNPLPDGKIFNSNQPLLENLLKVHHAEICAAEQLPDNYEDTKNRLLELTKIADLIVTTGGVSVGDFDYMADIAKQEAELLFNKIQMRPGSPTTGMWLDKTLIIALSGNPGACFTGFYLLVEPVLTTLMGKDTTETTQVRAKMASDYTKNNGYDRFLRGTYRLSDEGEYLVELVGSDMSSALGNLHLTTCLFKIPRGQVGKLKGEEVEAWLLYSK

SEQ ID NO: 348 - protein, 256 aa, Listeria monocytogenes
MKKIVLIICCGLLLLLGACEDTPEKVQTTTIHISAAASLKDSIDDVKPLFEKANPTIKLSFDFGGSGQIRERVESGAPIDGVLLASKKDADTLIKQNLAEKTKEFAGNELVLIEPKNVDQKTEANLEQLLNDASKIAIGDPESVPAGAYAKQTLENLNLYNAEKAKLVLATDVRQVLSYVEAGNADAGFVYQTDALLSKKVQVKAKIDEKLHDPIAYYSAQVSDSDKKEETATFLDFMNKSEAQKILEKYGFKAAN

SEQ ID NO: 349 - protein, 223 aa, Listeria monocytogenes
MFTSVWHTLLVATISTFLAFMTMLPLSYYFAGRKSRFQLPVEILILLPLVLPPTVVGLVLLNILGRNDFIGGVLWDTFDFSFIFSLSGAIVATTIIILPIMYQGLKSAFLSIDHELVWAAETLSANKKQIFTKIILPNCWQPILAGVLLSFCRAMGEFGASLMVAGYIEGKTDTIASSIYFMVQQGDMRTAIYLGLINVIIGVFALLVIHVLTIRQSNLTRGM

SEQ ID NO: 350 - protein, 220 aa, Listeria monocytogenes
MLRLQFHKKLPFHDLNIDYTFEKPVTAMMGASGSGKSTLFQCVSGLKSIDGGIIEFDGTPWDDSNISLHLPVTERKVGYLFQNLALFPNMNVYENIAFGLKVKKKKKKEQAEIQQQVRKMSDYLQISHLLYSSVQKLSGGEKQRVAMARAMITEPKLLLLDEPFNGLDEETRLICMKLVGQMAKDFHIPVIFVTHYASEAEMMTEEILVMREGRLEKRKS

SEQ ID NO: 351 - protein, 193 aa, Listeria monocytogenes
LKNEKVNVGIVLAGGRSSRFGEPKAFFQDEATGKTWVELTVSKLLPLCDMVFVSANHENHSKLVALFDAEPSIEIIPDQTAFSEFGPLGGIYAVMVEANAYQKANFLVLPVDMPFLTPKEIGRLADYPNHFAKTAQANHYLVANIPYSREVLHHLLQDEQHRVRALLEKLHTKPLAFEEDAPFRNINHQNELF

SEQ ID NO: 352 - protein, 267 aa, Listeria monocytogenes
MQFFRLLWVFTWKQALCCIFPGIIFISLALTKLIDIPFIARYDLLLIICLATQVLLIKFGLETWDELKVIMVFHIIGLGLEIYKVHMGSWSYPEPGLMKLFGVPLYSGFMYSSVASYICQAWKRFDLKMTNWPNIWLVSSLCIAIYANFFTHHFIMDFRWILIVLVLVLFRKTYVYFKVSSTQLKMPLSFSFLCIAFFIYLAENIASFYGAWSYPDQLVAWRPVHVSKITSWYLLVIISIIIVAQLKFVKQKLEQTSVKAKSEATLK

SEQ ID NO: 353 - protein, 421 aa, Listeria monocytogenes
MLKQSADKRRIEKNDKPFFYLADTVWSAFTNIDLTDWAYYLKVRKEQGFNVLQINILPQWDRSVLKKIQEPFGINEGFFDLKAKNEAYFKHAEKMLEMAVNQGFTPALVLLWCNYIPETWGAKFGTSPLFRKEDIKPYTEMMLEHFEQFEPIYIISGDTDFPTETVTDYYLEALETVSKKAPHALKVLHICGRLKDIPENLQTHPALDLYFYQSGHNSEHQSMAYTLAEHFSQLEPIKPVINSEPCYELMGYSRQKYGRFSREDVRKAAWQSVLSGAIAGISYGAHGIWSWHEEGSTFGSALGEGFVSPFNWRQALHFEGATDYAFLKSFILANDLTTLAPINLVLNQTPEIRAAETEKVVIIYVPSNVPIYLKGQFVSLDDYAIDLEQGKKVSLAKILHEEKTEIQMTPFLKDSLYVIHK

SEQ ID NO: 354 - protein, 618 aa, Listeria monocytogenes
MNNSDLAKEVVKLVGGKENILSVIHCVTRLRFKLRDENLAETEKIKALKGVMTVVKSGGQYQVVIGDHVSYVYDEVIRVLGIKPDDALQDNPEQEHKSIFNKFVELISGIFMPVLGLLAASGILKGFLTAAVTMGLINTSAGVYEVLYAASDALFYFMPIILGFSAGKVFKTNQYLSAAVGAALVYPTLVDMYSSGAHLTFLHIPVILMNYTMSVIPVILAIYFMSKLEKVLVKFIPKSLQLIFVPLLLLLIVVPVSLIIIGPVSTYASQLLAKGALGLYSLSPMIAGFFLAGVWQVAVMFGLHWAFIPIFINNISVLGYDPINAMLYCTVFAQTGAVMAVMLKTRNQELRSLSITATISGFLGITEPAIYGVNLPYKKPFIMACVGSAFGGAIAGMSAAKMFGGFASGGIFGIPMFINPDGIGWDFWGFLISLVVAFSVALILTYFFGFKDKVEEVVIQTGEKATLDETIYSPLQGELIALNDVKDEVFSAGIMGAGVAILPASGEIRAPFDGTVLSVFQTKHAIGLISKQGVELLIHVGLDTVNLNGQFFDIEVSESEEIKKGDLLGTFELDTIKKAGYDITTPIIVTNSATLADVITVNLGKHVDNNQKILEAKA

SEQ ID NO: 355 - protein, 487 aa, Listeria monocytogenes
MKKHYQIAIDQSTSGTKVLLFKEGKLVDRLDKKHRQLYPKKGWVEHNPIEICQNVRTLIADILTKHDLITADIERLALTNQRETIVAWDKQTGKPLYNAIVWQCNRTKEICETLKEAGYEKRIKQLTGLKIDSYFSASKMMWLLENISAVRDAASRNQLAFGTMDAWLLFSLTDDSNYFTDRTNASRTLLYDIEKNDWSDELLELFGVKRAYLPEVKQSAGSFGSYQEIPIHSVMADSEAALYGQGCDTFGAVKATLGTGCSVMMQIGENRLPENDAILTTLAWDVAGVNQFALEGIIRSCGDTLVFLSEQLELFNDYDTACKRAFQLPCNEGVVLIPGQLGLGAPYWNTDIRAEILGLTREHTKWHIIRAGFTSIAFQIKAVIDQMELMIGQNIKRLQVDGGLTKQHELMQYLADVLKAEVAVSPAEELSAIGAIEIADNNLQNKRTIAKLYQPSITHTHALEDFQEWEKQVKSSILKIQKVRNFK

SEQ ID NO: 356 - protein, 318 aa, Listeria monocytogenes
MNKIANRQVMCEVLMKEATRNDSNLVVLTSDSRGSASLGAFAEKFPERLIETGIAEQNIVGIAAGLAHSGKRAFVASPACFLSMRSIEQVKVDVAYSDTNVKLIGISGGVSYGALGMSHHSLQDIAVTRAIPNLEVILPADRLETEAIFDYLLQSNRPAYVRLGRNAVEDCYAEKPVFQIGKAGTLREGNDVSILATGEMVRVALDASEELKLKGISARVLNFSTIKPFDQEVVKAALTETKLLISIEEHSIYGGLGAAVSEVVSSSPTSIRHLILGIPDEPAIAGTSQEIFDYYGLSATGIVATIMKNLPIIGDERR

SEQ ID NO: 357 - protein, 274 aa, Listeria monocytogenes
MSELKLKSFEIRKDVLKMIYDAKTGHTGSDLSCADILVALCYGVLNVNPENPEALDRDRYVQSKGHAVEVLWAVLADKGFFAKEELADFSAFGSRIIGHPNNKVAGIEMNTGSLGHGLSVSVGMALAAKMDGKSYHTYTLMGDGELAEGSVWEGAMAAANYKLDNLTAIIDRNSLQISGRTEDVMSVEPLADKWRAFGWDVIEADGNNPDKLQAIFKTVNETGKPRLIIAKTIKGYGVKMAENVAKWHHYVPSSEEYEIAMKDLEERMEACRHE

SEQ ID NO: 358 - protein, 467 aa, Listeria monocytogenes
MEAIKIGFAPTRRSIFSAPDAIKYANLTRDKLNELNIEFVDITEFNEDGLLYDDADVMKIAAKFKKAGIQGLFLPHTNFGTEYVCARLAKELDVPVLLWGPRDERPDENGIRLRDTQCGLFATGKILRRFQVPFTYMTNCRLSDPEFERGIRDFIAVCNTVKTFQNMRILQIGPRPFDFWTTMCNEGELLEKFNVQLAPIPLPELMKEIRSVSSEQIEEVDGTVEYCHGCAIVKIKEVDLRMVAALKVAMKNLATKYGCSAIAIQCWTALQDEIGIMPCAANAMLIDEGIPVVCETDIHGAISCLLIEAANLGRNKSFFADWTVRHPDNENGELLQHCGLFPFSVAKDKPAIGYPLAFDSPGAVEAEAKGGELTLCRFDGDNGEYSLLLGKARGIEGPYTKGTYLWIEVDNLKRLEEKIVSGPYIHHVSGIHADVVPILYETCKYIGIKPDLYDPIEEDIKAYLRGE

SEQ ID NO: 359 - protein, 498 aa, Listeria monocytogenes
MSNENHEELNDQLIVRREKVDTLREEGIDPFGEKFIRSISPEEIETKFADKSKEELEEAAIEVSVAGRIMTKRVKGKVGFTHIQDRFHQLQIYIRKDAIGEDAYAVFKLADLGDIIGIKGTIFRTNTGELSVKATEFTLLSKSLRPLPDKYHGLKDVEQRYRQRYLDLITNEESQNRFVMRSKILKYTRDYMDNQGFLEVETPVLHTIAGGAAAKPFITHHNALDMELYLRIALELHLKRLIVGGMDKVYEIGRVFRNEGTSTRHNPEFTMLESYAAYEDYEDVMDLVEGLVSTVCKQVNGTTEITYGEYKVDLTPNWRRIHMADAVKEYVGVDFWNVTSDEEARELAKKHDVPVTEHMTYGHILNEFFETYVEEKLIQPTFVYGHPVEISPLAKKNKEDERFTDRFELFIVGREHANAFSELNDPIDQRERFEAQMKEREQGNDEAHGMDADFLEALEYGLPPTGGLGIGIDRLVMLLTDAPSIRDILLFPTMKHRD

SEQ ID NO: 360 - protein, 331 aa, Listeria monocytogenes
MFKIGNVEIKNQVVVAPMAGISNSAFRLTVKEFGAGLVCCEMISDKGIAYRNAKTLDMLYIDEKEKPLSLQIFGGEKETLVEAAKFVAENTTADIIDINMGCPVNKIIKCEAGAKWLLDPNKVYDMVAAVVDAVDKPVTVKMRIGWDEEHVFAIENALAAERAGAAAVAMHGRTRVQMYEGSANWDVLRDVKRELKIPFMANGDVRTPEDAKRILEHTGADGVMIGRAALGNPWMIYRTVKFLETGELLLEPEPREKMQTAMLHLNRLVELKGENIAVREFRQHAAYYLKGARGSTRAKVAANQATKQSEMEAILNEFVLQYEEKALAKQD

SEQ ID NO: 361 - protein, 159 aa, Listeria monocytogenes
MAKAFLSIGTNIGERLENLNDALRGLAASNQINITNVSSVYETDAVGYEDQAAFLNIAVEIETDFPPIDLLDFCLALELELGRVRLFKWGPRLIDIDVLLYDDVKTDTEKLKIPHPYMKERAFVMIPLIEISPEKSNLVENPALLEEQGVRKIKNQVNW

SEQ ID NO: 362 - protein, 124 aa, Listeria monocytogenes
LDKIYLNELVFYGYHGVLKEETKLGQTFRVSLILGLSTKKAGISDSVEDTVSYADVYETVKEIVEGKPFKLIEALAEKIASEVLTGYPLLEEVTVKLIKPNPPIPGHYDSVAVEIERKRSDLNG

SEQ ID NO: 363 - protein, 271 aa, Listeria monocytogenes
LKKWKRDHLGMVMGILNVTPDSFSDGGKYMQVEEAVARALQMAEDGAAIIDVGGISTRPGFSEVTPDEELARIIPVIKAVRTKLPDIWISVDSWRAEVAEQAILAGADMINDQWGAKKEPKIAEVAAKYDVPICLMHNRENAQYDNFLEDVKKDLLESIAIAKAASVPDEHIILDPGFGFVKTPAQNLEVLRRIDEIVALGYEVLLGTSRKSTIGLVLGTTPGDRMEGTGATTVYGFSKGCTITRVHDVLPIARMVRMTDAITGKLDITNL

SEQ ID NO: 364 - protein, 308 aa, Listeria monocytogenes
MTIANSITDLIGKTPIVKLNRLPEAGSADVYVKLEFQNPGGSVKDRIANAMIESAEKSGALKPGDTIIEPTSGNTGIGLAMVAAAKGYQAIFVMPETMSLERRKLLQAYGAKLVLTPGPDGMKGAIAKAEELAKENNYFVPQQFHNPANPAVHEETTGPEIVEAFGKDGLDAFIAGVGTGGTVTGVGHVLKKNYPDVKIYALEPEESPVLSGGSPSPHKIQGIGAGFVPDTLDTKVYDGILKVSSEDALETAREVAKKEGILVGISSGATIKAALDLAKELGAGKKVLAIVASNGERYLSTPLYNFED

SEQ ID NO: 365 - protein, 294 aa, Listeria monocytogenes
MSDYLVKALAYDGMARVYAAVTTETIKEAQRRHDTWSVSSAALGRTMTGTLFLGAMQKEDQKITVKIEGDGPIGPIVADSNAQGQIRGYVTNPHVHFSELNEAGKLDVRRGVGTSGMLSVVKDLGFGENFTGQTPIVSGEIGEDFTYYLATSEQINSSVGVGVLVNPDDTIEAAGGFMLQLLPGATDEIIDEIEKNLMALPTVSRMIEAGETPESILAKLAGGEDKLQILEKIPVSFECNCSKERFGSAIISLGKEEIRSMIEEDHGAEAECHFCRNTYDFSEEELKTLYEEAK

SEQ ID NO: 366 - protein, 259 aa, Listeria monocytogenes
MILVIDVGNTNCTVGVYEKQKLLKHWRMTTDRHRTSDELGMTVLNFFSYANLTPSDIQGIIISSVVPPIMHAMETMCVRYFNIRPLIVGPGIKTGLNLKVDNPREIGSDRIVNAVAASEEYGTPVIVVDFGTATTFCYIDESGVYQGGAIAPGIMISTEALYNRAAKLPRVDIAESSQIIGKSTVSSMQAGIFYGFVGQCEGIIAEMKKQSNASPVVVATGGLARMITEKSSAVDILDPFLTLKGLELLYRRNKPTTEK

SEQ ID NO: 367 - protein, 691 aa, Listeria monocytogenes
MNRFFRNAIFYVIIFLVIIGIVASFNSNKEAAKDISYSEFVSKLEDGKVKSVEIQPDRSVYTINGEFKSSDKSSDDKKTGLGQSKTSSTAFTTYALNSDTSLGDLQKTLDKEDVKMNVVPAKQNSGWVTFLTSIVPFVIIFILFFFLMSQSQGGGGGKVMSFGKSKAKLYNDDKKKVRFTDVAGADEEKQELVEVVEFLKDPRKFAELGARIPKGVLLVGPPGTGKTLLARAVAGEAGVPFFSISGSDFVEMFVGVGASRVRDLFENAKKNAPCIIFIDEIDAVGRQRGAGMGGGHDEREQTLNQLLVEMDGFGGNEGIIIIAATNRADVLDPALLRPGRFDRQIMVDRPDVKGREAVLRVHARNKPLAKSVDLKAIAQRTPGFSGADLENLLNEAALVAARSDKKEIDMSDLDEASDRVIAGPAKKNRVISEKERRTVAYHEGGHVIVGMVLDEAEVVHKVTIVPRGQAGGYAVMLPKEDRFLMTKAELMDRITGLLGGRVAEEVTFGEVTTGASNDFERATELARRMVTEWGMSDKIGPLQFTSGNGQVFMGRDFGSDKGYSDKIAYEIDTEVQSLIRYCYDRAKTIITEHQEQHKLIAETLLKVETLDARQIRSLFDDGVMPPDIDTIDVEAEYPSEKDEEVAGKSFEEEREELKEEEKVEETQEEPKEVTSEDAPNIEQTPNDKKDE

SEQ ID NO: 368 - protein, 648 aa, Listeria monocytogenes
MDDTEKRVHKYIEKHDLIRSDDKLLVAVSGGPDSLALLHFLWNSNLVPKEAISVAHLNHQLRENAAKEQRVVETFCERQGIPFYIEEVDIKSRAQSLQKGLEETARIVRYDFFEKVMAEKNINKLVLAHHADDQIETILMRLVRGSASIGWSGIQPKRELKGGQAIRPFLPITKAEIIDYAQKHELAYEIDESNTSQEYTRNRYRAQLLPFLKQENPAVYSHFERFSEETSEDFQFLEALASDLLKKNLIKNGKQTTLLLSSFKNEANPLQRRAIHLLLRYLYNEDASFITVNHIYQIIQMIQSDNPSSSIDLPNKLIANRAYDKLHFQFGEREAPSEFYHQLELNDRIELDNKASIRLKLKSSVVQTNGLNGMLLDAEEITLPLIVRNRVNGDRMTMKGQAGSKKLKDIFIDAKIPRQERDKLPVITDYTGKILWVPGVKKSAYDREFSRSKKQYIIRYTRNIGGNESMHNDIQKVLISEDELQEKIRELGRELTTEYEGRNPLVVGVLKGATPFMTDLLKRVDTYLEMDFMDVSSYGNGTVSSGEVKIIKDLNASVEGRDVLVIEDIIDSGRTLSYLVDLIKYRKAKSVKLVTLLDKPAGRNVEIEADYVGFVVPNEFVVGYGLDYAERYRNLPYIGILKPEIYSE

SEQ ID NO: 369 - protein, 142 aa, Listeria monocytogenes
MSIEVGNKLQGKVTGITNFGAFVELEGGKTGLVHISEVADNYVKDINDILTVGDEVTVKVMNIGDDGKIGLSIRKAVDRPDRPEKSYDRKPKYNKKPAGNYVKPAESFEDIMSKFLKDSDERLTTIKRQTESKRGGRGAKRG

SEQ ID NO: 370 - protein, 128 aa, Listeria monocytogenes
MKKAKSKVARIENRYIKDTATMKKTRSRRRIALFRRLAFMAIIFAVVGGLLTITYTKQVLTLKEKKEKQVQVDKKMVAMKDEQDSLNEQIKKLHNDDYIAKLARSEYYLSKDGEIIFNIPEENSKQKE

SEQ ID NO: 371 - protein, 529 aa, Listeria monocytogenes
VSERSMKRLMKGAAWLTAASLISKILSAIYRVPFQNMVGDVGFYIFQQVYPIYGIAMTLALGGFPVVISKMLAEAEGDVRRQQIIMRAVSRMLRIVSIVIFAFLFLFANLIAIMMGDPALSELIRVISFVFLLMPQLAFMRGFFQGEGDMIPTAISQTVEQIIRVAIILIGAGLALHFNFDLYDAGSMAMSGAFFGGVSGIFILRHFYNKKVRLGEGIQPAVFTNKEEKVGIGRTFLRQSVAICVVSSMLILFQLVDSFQVYRLMSDSGIPDFIAKSLKGVYDRGQPILQLGLVISTGLALALVPMITAARVQGQQKELKRSVLLAIKITLILSGAETIGLIVIMRPLNQMLFQTPDGTFVLQLFMPAVFLSSLIIMLSSILQGFGKIAVPAVGVGIGLIVKWVTGGILIPRLATVGASVSTCVGLLVILLICYVSLKQTIRVPFVEKTMLFRLVAALVLMAVFPCLFEWLAPLDTRLGSAFQAIVSALVGGGIFLVFALRYKLLGPKDFVFLPFGSKLLALSKLVARK

SEQ ID NO: 372 - protein, 1179 aa, Listeria monocytogenes
LKGLQQLIYEQKDIRAVLNALDEKEKAQLVTGLTGSSRALFASVVEGASKRPVVFVTHNLYHAQKLYDDLLSLMDVDRLFLYPADELISSELSISSPELRGQRVEALDFLLSGKPGIVIVPVAGLRKMLPPVSLWKHFNISIVEGEEIDPDVLRQKLVTMGYTMSGMVNTPGEFSVRGGIIDIYPITEEFPIRIELFDTEVDSLRFFDVETQRSTTRVEEFRLLPATEIILDQSYYPDIVKRLEKKMMLTLNELKEQEDKQALIENLEEDLEMLRSGVKPDMFFKYIGLAYPDPASLFDYLPKNTAILLDEFGRILETEESLEREEAEWQTETLSRMETVRDVQVSHSFKKLLEGNHSPKIYLSLFQKQMASMRVSKTTNIVYKQMQQFHGQMNVLKTELESWHKNNYAVVILAPNLERAEKMQQTLTDYDMESTILKKESDVPKYGMVQFVIGTFQNGFELPLAKVAIISETELFNKKIKKVKKRQKLSNAERIQSYSELKVGDYVVHVNHGIARYVGMETLDINGVHKDYLLLVYQGEDKLFIPVDQLDLVQKYVGAEGKSPRLNKLGGAEWKRVKKKVQASVQDIADDLIKLYAEREAEKGYAFSADDEMQREFEEAFPYQETEDQLRSISEIKKDMERPRPMDRLLVGDVGYGKTEVALRAAFKAIMDGKQVAFLVPTTILAQQHFETMKERFQGFPIEIGLLSRFRTKKQQTETLKGMKNGTVDVVVGTHRLLSKDVEYQDLGLLIVDEEQRFGVTHKEKIKQMRSKIDVLTLTATPIPRTLHMSMLGVRDLSVIETPPANRFPVQTYVAEQNNVLVREAIERELARDGQVYYLYNRVESITQKADEISAMVPDARVATAHGQMGESELESVILSFLEGEFDVLVTTTIIETGVDIPNVNTLFVQDADRMGLSQLYQLRGRVGRWNRIAYAYFMYQKDKILREEAEKRLSAIKEFTELGSGFKIAMRDLSIRGAGNILGAQQHGFIDSVGFDLYSQMLKEAIEAKKPKEEQKQIVPVEIDIQADAYIPEYYITDGRQKIEMYKRFRNIETLSELEDLQSDMIDRFGEYPEEVEYLFTMTELKVRALEVGIESVKQEQNKITMLFSESGTAGIRGDIVMQIIGEFGRMVGVGMEGTQLKITINVQNKPLKEWLYQVKSLAEKLRGAMKEKASTEN

SEQ ID NO: 373 - protein, 186 aa, Listeria monocytogenes
MKLIAGLGNPGKKYERTRHNVGFMVVDELSFRHQTPWKKSKFNGMTSEIIVGGEKMILVKPLTFMNASGECIRPLMDYYNIPIEDVVIVYDDLDLPVGKIRLRQKGSAGGHNGMKSIIQHVKTQEFNRIRVGVSRPLKGEVINYVLGDFPKAEQPDIIAAIQKSADAIEDFAQTPFIEVMNKYNQK

SEQ ID NO: 374 - protein, 194 aa, Listeria monocytogenes
MLDKSVPHISVIMVNHDATNYPEFHLPAGYSFCFYKDGLEEDWCRLQLETGQVLSMDSIRARFETEFGNEKEKLTKRCIFVKAPNGEIIGTAMLWDGNTFGKIESRIHWVAVLDSHGGKGIAKALLSKILGLNKSKFVYLTTQTGSYQAIYLYRKFGFEKYVGKTPENWKTVNFQEEKETAWQIIENKIAEHQA

SEQ ID NO: 375 - protein, 207 aa, Listeria monocytogenes
MATTLEVQKRETTQHSEVTRLRSEGKVPGIIYGYKSENVPVSVDSLELIKAVRDNGRNAVFSVTVDGKKLNVLLHEYQVDPLKDVLVHVDLLAVDMNEEVETDVRVVLVGDAPGVKAGGVLQQIIHDVKVSATPEKLPETIELDISSLEIGDVLTTNDLPENKDYVVQAEEEETVVTVSAPRAEEEPTTTEAPEPEAVHGKDEEPVE

SEQ ID NO: 376 - protein, 313 aa, Listeria monocytogenes
MKDHQKIILVGDGAVGSSYAFACVNLSIGQEFGIIDIDKDRTIGDAMDLSHAVPFSTPKKIYSANYSDCHDADLVVVTAGTAQKPGETRLDLVNRNIKIMKGIVDEVMASGFDGIFLIASNPVDILTYATWKFSGLPKERVIGSGTSLDTARFRMSIADYLKVDARNVHGYILGEHGDTEFPAWSHTTVGGLPITEWISEDEQGAMDTIFVSVRDAAYEIINKKGATFYGVAAALARITKAILNNENAILPLSVYLDGHYGMNDIYIGAPAVVNRQGVRHIVEMNLNDKEKEQMKNSADTLKKVLDDAMKQID

SEQ ID NO: 377 - protein, 224 aa, Listeria monocytogenes
MITFDQLDTELQALENPNTIKIFRNHGCPDSLDLYGLKIGDLKKIIRREKLTKNHELAVKLIESNNSDLIYLGLLAINPNKITTEQIEKWNIAFRETWSQLTFGLASIVSKRDDALLFAKTWIESDYDLTKSMGWQIYSEHINNLPEAETLLQRAKETLQTETNRTRYSMNGFIITCGIYKDDLHEKAMEAAKSVGKVHVNLGNTACKVPDAISYIEKARNRTK

SEQ ID NO: 378 - protein, 110 aa, Listeria monocytogenes
MIVTTSPNIEGKQIIEYKKIVFGEVITGVNFMKDIGAGLRNFFGGRSQGYEDELINAREEAIREMEQRAKDIGANAVIGVDIDYEVLGADNGMLMVTASGTAVVIEAQDY

SEQ ID NO: 379 - protein, 153 aa, Listeria monocytogenes
MKMLKKGTAVLFVMIMAVMLVACGDKEETKTYTLSQNGVDSKLTYTYKGDKVTKQTAENTMSYASLGVASKEDAEKMLKATSDKFQGIDGLKEKIEYKDDKAIETLEVDYTKISSEDMNKIPGMSSNGDTSKGISMEESAKMLESQGYKEVSK

SEQ ID NO: 380 - protein, 107 aa, Listeria monocytogenes
MYIKGRLIFFFVVLVIALCSVLILLIIKISVWKDEPFHLSDAKEIECLGSCEIKNTNQKIHFFSIKENLFEEKGDIAGILNEDEQKVADKSIFIVILDDEKGIANEE

SEQ ID NO: 381 - protein, 289 aa, Listeria monocytogenes
MKFKKVVLGMCLIASVLVFPVTIKANACCDEYLQTPAAPHDIDSKLPHKLSWSADNPTNTDVNTHYWLFKQAEKILAKDVNHMRANLMNELKKFDKQIAQGIYDADHKNPYYDTSTFLSHFYNPDRDNTYLPGFANAKITGAKYFNQSVTDYREGKFDTAFYKLGLAIHYYTDISQPMHANNFTAISYPPGYHCAYENYVDTIKHNYQATEDMVAKRFCSDDVKDWLYENAKRAKADYPKIVNAKTKKSYLVGNSEWKKDTVEPTGARLRDSQQTLAGFLEFWSKKTNE

SEQ ID NO: 382 - protein, 639 aa, Listeria monocytogenes
VGLNRFMRAMMVVFITANCITINPDIIFAATDSEDSSLNTDEWEEEKTEEQPSEVNTGPRYETAREVSSRDIKELEKSNKVRNTNKADLIAMLKEKAEKGPNINNNNSEQTENAAINEEASGADRPAIQVERRHPGLPSDSAAEIKKRRKAIASSDSELESLTYPDKPTKVNKKKVAKESVADASESDLDSSMQSADESSPQPLKANQQPFFPKVFKKIKDAGKWVRDKIDENPEVKKAIVDKSAGLIDQLLTKKKSEEVNASDFPPPPTDEELRLALPETPMLLGFNAPATSEPSSFEFPPPPTDEELRLALPETPMLLGFNAPATSEPSSFEFPPPPTEDELEIIRETASSLDSSFTRGDLASLRNAINRHSQNFSDFPPIPTEEELNGRGGRPTSEEFSSLNSGDFTDDENSETTEEEIDRLADLRDRGTGKHSRNAGFLPLNPFASSPVPSLSPKVSKISAPALISDITKKTPFKNPSQPLNVFNKKTTTKTVTKKPTPVKTAPKLAELPATKPQETVLRENKTPFIEKQAETNKQSINMPSLPVIQKEATESDKEEMKPQTEEKMVEESESANNANGKNRSAGIEEGKLIAKSAEDEKAKEEPGNHTTLILAMLAIGVFSLGAFIKIIQLRKNN

SEQ ID NO: 383 - protein, 510 aa, Listeria monocytogenes
MKSKLICIIMVIAFQAHFTMTVKADSVGEEKLQNNTQAKKTPADLKALPDSCEAKDFYKNFKILDMTKDKLGVTHYTLALSSGGYLTDNDEIKVHVTPDNKITFINGDLQQGQLRITNQIKITEKNAIEKAFEAIGQSEAHVKSYVGNPVKEKEIILNSRTKRLVYNIKLIFAEPEVASWIVQVDVETGAILKKQNMLSEVERADTHKDFQALGKGANRLLQRPLHVMKINDLFYLVDRTHKGLIRTFDLKHNTDTSFGKVVSNKTNMFTDPEFSSAVDAHFYASEVYEYYKNVHQLESLDGKGGEIDSFVHYGLNCNNAFWDGQEILYGDGDKKNFKPFSCAKTIVGHELTHAVIQYSAGLEYEGQSGALNESFADVFGYFIAPNHWLIGEDVCVRGSRDGRIRSIKDPDKYNQAAHMKDYESLPLTEEGDWGGVHYNSGIPNKAAYNTITKLGKEKTEQLYFRALKYYLTKKSQFTDAKKALQQAAKDLYGEDASKKVAEAWEAVGVN

SEQ ID NO: 384 - protein, 529 aa, Listeria monocytogenes
MKKIMLVFITLILVSLPIAQQTEAKDASAFNKENSISSMAPPASPPASPKTPIEKKHADEIDKYIQGLDYNKNNVLVYHGDAVTNVPPRKGYKDGNEYIVVEKKKKSINQNNADIQVVNAISSLTYPGALVKANSELVENQPDVLPVKRDSLTLSIDLPGMTNQDNKIVVKNATKSNVNNAVNTLVERWNEKYAQAYPNVSAKIDYDDEMAYSESQLIAKFGTAFKAVNNSLNVNFGAISEGKMQEEVISFKQIYYNVNVNEPTRPSRFFGKAVTKEQLQALGVNAENPPAYISSVAYGRQVYLKLSTNSHSTKVKAAFDAAVSGKSVSGDVELTNIIKNSSFKAVIYGGSAKDEVQIIDGNLGDLRDILKKGATFNRETPGVPIAYTTNFLKDNELAVIKNNSEYIETTSKAYTDGKINIDHSGGYVAQFNISWDEVNYDPEGNEIVQHKNWSENNKSKLAHFTSSIYLPGNARNINVYAKECTGLAWEWWRTVIDDRNLPLVKNRNISIWGTTLYPKYSNKVDNPIE

SEQ ID NO: 385 - protein, 317 aa, Listeria monocytogenes
LYKNYLQRTLVLLLCFILYFFTFPLGGKAYSLNNWNKPIKNSVTTKQWMSALPDTTNLAALSIPGTHDTMSYNGDITWTLTKPLAQTQTMSLYQQLEAGIRYIDIRAKDNLNIYHGPIFLNASLSGVLETITQFLKKNPKETIIMRLKDEQNSNDSFDYRIQPLINIYKDYFYTTPRTDTSNKIPTLKDVRGKILLLSENHTKKPLVINSRKFGMQFGAPNQVIQDDYNGPSVKTKFKEIVQTAYQASKADNKLFLNHISATSLTFTPRQYAAALNNKVEQFVLNLTSEKVRGLGILIMDFPEKQTIKNIIKNNKFN

SEQ ID NO: 386 - protein, 237 aa, Listeria monocytogenes
MNAQAEEFKKYLETNGIKPKQFHKKELIFNQWDPQEYCIFLYDGITKLTSISENGTIMNLQYYKGAFVIMSGFIDTETSVGYYNLEVISEQATAYVIKINELKELLSKNLTHFFYVFQTLQKQVSYSLAKFNDFSINGKLGSICGQLLILTYVYGKETPDGIKITLDNLTMQELGYSSGIAHSSAVSRIISKLKQEKVIVYKNSCFYVQNLDYLKRYAPKLDEWFYLACPATWGKLN

SEQ ID NO: 387 - protein, 318 aa, Listeria monocytogenes
MSNEYFDPKLKIFSLNSNRELAEEIAKEVGIELGKSSVTHFSDGEIQINIEESIRGCHVYVIQSTSNPVNQNLMELLIMIDALKRASAATINIVMPYYGYARQDRKARSREPITAKLVANLIETAGATRMITLDMHAPQIQGFFDIPIDHLNAVRLLSDYFSERHLGDDLVVVSPDHGGVTRARKMADRLKAPIAIIDKRRPRPNVAEVMNIVGNVEGKVCIIIDDIIDTAGTITLAAKALREAGATKVYACCSHPVLSGPAMKRIEESPIEKLVVTNSIALPEEKWIDKMEQLSVAALLGEAIVRVHENASVSSLFE

SEQ ID NO: 388 - protein, 457 aa, Listeria monocytogenes
MSKRYAVVLAAGQGTRMKSKLYKVLHPVCGKPMVEHVVDQISTLNVDKVVTIVGHGAEKVQEHLAGKSEFVKQDEQLGTAHAVLQAKAELAGKDGVTLVVCGDTPLIEASTMEALLKYHHEKRAKATILTTVIEDPTGYGRIIRDDLGIVEKIVEHKDATEKEQRISEINTGTYCFDNKALFEALENVSNDNVQGEYYLPDVIKILKDSDEVVAAYRMESFEESLGVNDRIALAEASKLMQRRINENHMRNGVTLVNPESTYIDIDVKIGQDTVIEPGVMLRGKTVIGDDCVVTSGSEIVNSVIGERVHVRTSSIFESKVGDDVQIGPYAHLRPESDIHDHVKIGNYVETKKAVVGEGTKLPHFIYMGDAEIGKNVNVGCGSIAVNYDGKNKAKTIIGDNVFVGCNSNLIAPVKVGDRAFIAAGSTITKDVPEDALGIARAKQDNKLGYAKHLNHSK

SEQ ID NO: 389 - protein, 214 aa, Listeria monocytogenes
MKTINIMVGGPASEIPDLAQYTSGEISWIGVDRGAKRLLDRGIIPTIAMGDFDSLSKEELTYLKTKVADVLEFPAEKDETDTEIGLSWAMEQKPDKIRIFGATGGRLDHLLANLMMLTKPKFLSAVPVVEMIDRYNYIKMYTPGSYTIEKLPDKKYVAFTTMRDVTGLTLKGFAYPLENATYPVGSALSSNEFVGQMGEFSFKSGMILLTQSND

SEQ ID NO: 390 - protein, 218 aa, Listeria monocytogenes
MGKIAPSILSADFATLARDIKEVENCGADYIHIDVMDGHFVPNITFGPAVVQAIRPETKLPLDVHLMIENPDTYIPEFAKAGADYITVHVEACTHLHRTLQLIRSYGVKAGAVLNPATPIDVLQHVLNELDMVLFMTVNPGFGGQKFIPEVLEKISAFKEIVDKKGLDIEIEVDGGVDHETAKLCRDAGANVFVAGSYIYGNKNRQTPIDKLRAIVGE

SEQ ID NO: 391 - protein, 291 aa, Listeria monocytogenes
VLEGQIIKALSGFYYVFSEGKVYQCRARGNFRKRNISPLVGDDVEFQIENKTDGYILDVMSRENALVRPPVANIDIAILVFSAVEPDFSTNLADRFLVAIEKEDIKPVICISKMDLASESEKEQIAVYKDIYEAIGYDVFVTNDEPDKEAIKDYISGKTAVIAGQSGVGKSTLLNSLNSDLTLKTAEISNSLGRGKHTTRHVELMPIGDGFVADTPGFSSIEWDDLQPETLQFCFPEIEDRRSGCKYRGCMHENEPSCAVKTAVEANEIAEFRYKHYIQILQELKNRKPRY

SEQ ID NO: 392 - protein, 655 aa, Listeria monocytogenes
MMIGKRLSDRYKILHAIGGGGMANVYLAHDIILDRDVAVKILRIDLADESNLIRRFQREAQSATSLVHPNIVSVYDVGEENDLHYIVMEHVDGMDLKQYIHENHPISYEKAVDIMLQIVSAVAIAHQHHIIHRDLKPQNILIDHDGVVKITDFGIAMALSETSITQTNSLLGSVHYLSPEQARGGMATQKSDIYSLGIVLYELLTGKVPFDGESAVSIAIKHLQADIPSAREQNPEIPQSLENIIIKATAKDPFLRYQNAEEMEKDLQTCLNKDRLNEPKYVFPTDDGDTKAIPIIATKDTMQNLDKTIVPEGKVAAAEVVPEEKKDKKKKKMSKKKKIALIVSSVIIIFIIGILLLWLLGKSPDEVAVPDVSGKTEDQAVALLQKEGFVIGKTAEKNSDEVDEGKVINTDPEAGEMKEKGTKINLFVSIGSKKITMDDYTGRSYTDTKALLEEQGFKNISSEEAYSSEIEKGLIISQTPTQGTEVVAKSTDVKFVVSKGAEPITLKDLRGYTKTAVEDYASPLGLKVSSKEENSSTVEKGQVISQSPSAGTAMNSGDTIEIVISAGPKEKQVKEVTKTFNIPYTPSDEENPQPQKIQIYIQDKDHSMTSAYREMSITQNTSVEITFQIEEGSSAGYKIISDDKVIDEGTVPYPN

SEQ ID NO: 393 - protein, 252 aa, Listeria monocytogenes
MHAEFRTDRGRIRHHNEDNGGVFENKDNQPIVIVADGMGGHRAGDVASEMAVRLLSDAWKETTALLTAEEIETWLRKTIQEVNKEIVLYAESEMDLNGMGTTLVAAIMAQSQVVIANVGDSRGYLLQNHVLRQLTEDHSLVHELLRTGEISKEDAMNHPRKNILLRALGVEGKVEVDTFVVPFQTSDTLLLCSDGLTNMVPETEMEEILKSKRTLSEKADVFITKANSYGGEDNITVLLVERDLTQKGRDAS

SEQ ID NO: 394 - protein, 444 aa, Listeria monocytogenes
MKKQKTVRAIALELIIKIENNQSYSHLLINDALKKQKLNPLDKGLLTELVYGTTQRKITLDYYLAPFLNKEPDNWVKNLLRMSVYQLTYLDKVPEHAILNEAGDIAKNMGHQGVTKFVNGVLRNVIRKGVPSIDAIKDPVQKIAVETSLPEWLAKRWADQYGIEQLREIGLAFLVAPHQSIRVNQTEIPTEQLIKELNDQGITVTRNEFIEEALLVEKGSVAETKAYKDGKCSIQDESSMLAAYALQLEDNLTVLDACAAPGGKTTHIAEKMHGTGMVHALDIHEKKTKLIDEAAKRLQLLNIRTAHLDARTASTMFEPETFDRILVDAPCSGFGVLRRKPDIKYAKTEKDIHKLAEIQLAILDDVSQLVKENGILVYSTCTIDKEENETVLRAFLEKHPDFTLEPVVLPEKLAQIKKDDFIQLLPTDIGSDGFFVSSLRKVKS

SEQ ID NO: 395 - protein, 312 aa, Listeria monocytogenes
MTKIIFMGTPEFSVPVLTQLASTYDVVAVVTQPDRPVGRKRVLTPPPVKKAALELAIPVYQPEKLRTSSELEELIALEADLLVTAAYGQILPNSLLESPKHGAINVHASLLPEYRGGAPVHYALLDGKTETGVTIMYMVEKLDAGDMISQRKIPITDEDNTGTMFDKLSILGAELLMDTLPDFLAGKITATPQDPEKVTFARNISREQEKIDWTKPGRTIFNQIRGLSPWPVAYTTLEEKPFKIWEATYEDTKEGGEPGAILADKTTLKIVAGDGTLIVPTVIQPAGKPKMDVHSFMTGAGRNLSKTTRFGE

SEQ ID NO: 396 - protein, 797 aa, Listeria monocytogenes
MINIAKVIVDVPAMQVDRPFDYYIPEDLEELIRPGMRVSVPFGNRKIQGFVIALGETEENPKLKGIDGVMDLAPVLNEELMELGDWLAEDTLSFRVSAYQAMLPAALRAKYEKYFLRLDEENEELEQLFEGYETLDWKVAEARGLLKQIGKWVREGSVEVVYQVKNKITNKKVRVVSCLKAPHQLAEIIEDMPKNAKAQSRVLAFFQALEGNEITAAELKKQAETTDATIKKLVDLGMLSIQEKIISRDPYENHQFEKSESLQLLPDQQTACKKITAATGQETFLIHGVTGSGKTEIYLQTIEAKLKEGKEAIVLVPEISLTPQMVERFKSRFGSEVAVLHSALSSGEKYDEWRKIERKEARVVVGARSAVFAPFENLGIIIIDEEHEASYKQEDNPRYHARDVAIWRATKYQCPVVLGSATPSLESFARAKKGVYTLIELPSRVNDRAMPEVSVVDMREELRKENRTEFSTELLEKIKDRIAKKEQTVLMLNRRGYSSFVMCRDCGYVVECPNCDISLTYHQSSNQMKCHYCGHEERVPQKCPSCEGEHIRYFGTGTQKVEESLTKLIPEARVIRMDVDTTRTKGAHEKLLKSFRNHEADILLGTQMIAKGLDFPDITLVGVLNADTMLHLPDFRASERTFQLLTQVSGRAGRHERTGEVIVQSYNPEHYSIEFAKKHDFIGFYNHEMQLRKMGSYPPFYYLTMINVSDENEMKAIRTIQEMAQFLRGKLGPDAVILGPVPSTITRIKNKYRYQCIIKYKIEPNLKKELKTLITHYQKDQQKGLTITIDVQPYVLM

SEQ ID NO: 397 - protein, 399 aa, Listeria monocytogenes
MQGKNILLAVSGGIAVYKAVALTSKLTQAGANVKVMMTAHAQEFVPPLSFQVLSKNDVYTDTFDEKKSSVVAHIDLADWADLVIVAPATANVIGKMANGIADDMVTTTILATEAPVWVAPAMNVHMIQHPAVIRNINRLYADGVRFIEPEEGYLACGYVGRGRLEEPEKIVLRIAEFFQEDKNLLQGKNVLVTAGATREKLDPVRYFTNHSTGKMGFSIAESAARHGANVTLITTSKALPVPHGVEAIYVESAEEMHQAVNERKVSQDIFVMTAAVADYTPAQVSDQKIKKQPGDFTIAMKRTKDILLEIGQHKTSEQVVIGFAAETENVEANARKKLTSKNADMIVANNISEAGAGFSGDTNIVTFYRKDGSSEALPILDKKEVAEHIIKEAANFLRK

SEQ ID NO: 398 - protein, 205 aa, Listeria monocytogenes
MTERGLLIVLSGPSGVGKGTVREAVFKDPETSFDYSISMTTRLPREGEQDGVDYYFRSREVFEQAIKDGKMLEYAEYVGNYYGTPLEYVEEKLAAGVDIFLEIEVQGAMQVRKAMPEGIFIFLTPPDLSELKNRIIGRGTESMEVVEERMETAKKEIEMMASYDYAVVNDVVANAVQKIKGIVETEHLKTERVIHRYKKMLEGLQ

SEQ ID NO: 399 - protein, 291 aa, Listeria monocytogenes
MVKSMTGFGRATKEFEAFKVTIELKAVNHRYSEFLFRMPKQLAYLEGKLKKTISKQIKRGRIEVFFSITGEQIAKRELHIDWDLADSYYRFIKQASARYELQELPTMGDLLQEQAYLSIEEEVEASSELERLVLETLARATERLDEMRSMEGAELLLYFKQHLAALENSLEIIQAEIPNTEKHYQEKIETRLQNVVGDQFDPSIVLTEVAMLLEKADINEEVERTKSHLKQFYGIILLEEPIGRKLDFLIQEMNREVNTIGSKASSLKITEQVVEMKTTLEKIREQVQNVE

SEQ ID NO: 400 - protein, 570 aa, Listeria monocytogenes
MAFDAMFLKAMTEELAEHGESGRIMKIHQPFSHELVLYIRKNRENKRLLISSHPSYARIQWTDDIPENPATPPMFCMLLRKYLEGAIIESITQLPNERILQFSIRGKDDIGENRFCDLFVEIMGRHSNITLVDRAKNVIVDCIKHVSPAQNSYRTLLPGATYVLPPATDKLNPFEVTSEQILDRLDFSAGRIDKQLVQNFAGFSPLLAREIVFRAGNLTADSLVAAFFEVMGLVNDHLGSAAVPNEWRIQNKEDYYFFSLRHVDAEITEFANLSTLLDHFYIGKARRDRVHQFAHDLEKLLSNELARSRLKIEKLENTLLETEKADVYRIQGELLTANLHLMERGMEEITVENFYDDMKKMTIPLDTRKTPSANAQSYFSRYQKLRNAVEVVKEQIALTKEEITYLESVESQLETSGPQDVEEIRQELAEQGYLRYKQKKGSRKKATLPAPEKYTSSTGLTILVGKNNKQNDYLTNKLARNNEYWFHVKDLPGSHVVIQSNNPDETSITEAAMIAAYYSKARLSATVPVDGTLVKHVKKPNGAKPGYVIYDNQTTYFVTPDEKLVLELKN

SEQ ID NO: 401 - protein, 199 aa, Listeria monocytogenes
MKILLIGASGTLGSAVKDRLEKKAEVITAGRHSGDVTVDITSIDSIKKMYEQVGKVDAIVSATGSATFSPLTELTPEKNAVTISSKLGGQINLVLLGIDSLNDKGSFTLTTGIMMEDPIVQGASAAMANGAVTAFAKSAAIEMPRGIRINTVSPNVLEESWDKLESFFQGFVPVPAAKVARAFEKSVFGAQTGESYKVY

SEQ ID NO: 402 - protein, 209 aa, Listeria monocytogenes
MSIEKQVAEQLLEIKAVFLKPNEPFTWASGIKSPIYCDNRLTLGFPKVRQFIAKSLAEKIKQTFGEIDVVAGTATAGIPHAAWVSDLLDLPMVYVRSKAKEHGKGNQIEGPISKGQKVVVIEDLISTGGSSLKAVEALEEAGAEVVGIAAIFTYGLAKGKQLLEESGTKLVTLTNYDELIEVALNENYVTGEDMETLKEWKKNPEKWGK

SEQ ID NO: 403 - protein, 233 aa, Listeria monocytogenes
MNKPIIALDFQTYEEVETFLAKFSGETLSVKVGMELFYSNGPVIVEKIKQQNHEIFLDLKLHDIPNTVKSAMIGLAKLGVDMVNVHAAGGKKMMEAAKEGLEIGSPSGKRPKIIAVTQLTSTSETDMQTEQLIKTSLLESVMHYSNLSKQAGLDGVVCSALEAEDIKQQNGADFLRVTPGIRLASDTADDQIRVVTPEKARLIGSSNIVVGRSITRANDPVAAYNQVLKEWNA

SEQ ID NO: 404 - protein, 304 aa, Listeria monocytogenes
MNRLAVEIPGLSLKNPIMPASGCFGFGQEYSKYYDLNELGAIMAKAVTPEPRLGNPTPRVAETASGMLNAIGLQNPGLEHVLAHELPFLEQFETPIIANVAGATEDDYVQVCARIGESKAVKAIELNISCPNVKHGGIAFGTDPEVAHRLTKAVKNVASVPVYVKLSPNVADIVSIAQAIEAAGADGLTMINTLLGMRIDLKTRKPIIANGTGGLSGPAIKPVAIRMIHQVRAVSNIPIIGMGGVQTVDDVLEFLIAGADAVAVGTMNFTDPFICPKLISELPKRMDALGISSLQDLKKERTNQ

SEQ ID NO: 405 - protein, 254 aa, Listeria monocytogenes
VLQTEMKVIQQTEIADKVYELILTGECVAGMSPGQFLMLKPSRSDLLMRRPISICSYDKTAKTCILLYRVEGDGTRDFSKLSEGDTIDVLGPLGKGFDIDTTPAPKTALLIGGGIGVPPMYQLGKELAEKGVQVMFVNGFQSAKDSFYAQEMAEYGTVHIATVDGSLGTQGFVTDITKNFPEEPDVIYSCGPKAMLQAVKASFPETKTYLSLEERMACGIGACYACVCPKADDTNKQFKVCEDGPVFRADEVKL

SEQ ID NO: 406 - protein, 1070 aa, Listeria monocytogenes
MPKRDDIKTILVIGSGPIVIGQAAEFDYAGTQACLSLKEEGYRVVLVNSNPATIMTDAEMADKVYIEPITLDFVSRIIRKERPDAILPTLGGQTGLNMAMELSAAGILDECNVEVLGTDLTAIKKAEDREAFRDLMNELGEPVPESDIIHNLDEAYAFVERIGYPVIVRPAYTLGGSGGGICHNEQELIETVTSGLKLSPVTQCLLEKSIAGFKEVEYEVMRDANNNAMVVCNMENIDPVGIHTGDSIVVAPSQTLSDREYQLLRDVSLKIIRALEIEGGCNVQLALDPDSYNYYVIEVNPRVSRSSALASKATGYPIAKLAAKIAVGLTLDEVRNPVTGTTFAHFEPTLDYVVAKIPRFAFDKFEQADRRLGTQMKATGEVMAIGRSWEEALLKAVRSLEIGADHLLLEEAENADEATLERKICFPEDDRLFFLAAALRRGQTIEQLHEKTKIDLFFLYKLSKTIELENRIKENPQNQEILAEAKQAGFSDAFLATCWNVDEQAIYDLRKAQNLFPVYKMVDTCAAEFESTTPYFYSTYEEENESTRSAKESVIVLGSGPIRIGQGVEFDYATVHSVWAIQQAGYEAIIINNNPETVSTDFSISDKLYFEPLTLEDVMHVIEIEQPLGVVVQFGGQTAINLADGLAKRGVKILGTSLEDTDRAENRDAFEKALEILQIPQPAGKTATSVEEAITVATDIGYPVLVRPSYVLGGRAMEIVESEEALKHYMTNAVKVNPKHPVLVDRYVSGQEVEVDAISDGVNVLIPGIMEHIERAGVHSGDSIAVYPAQRLSIQVKNTIVDYTTRLATGLNIIGMLNIQYVVDGEEVFVIEVNPRSSRTAPFLSKITEIPMANVATRVILGENLIDLGYTPGLAPEKQEIFVKVPVFSFAKLRSVDTSLGPEMKSTGEVMGKDVTLEKALYKGFVASGTTMHDYGTVLLTVADRDKEEAVELAKRFNRIGFTIMATKGTASTLEEASIPVSQVKKIGENQETLIDYIRNGQVTLVVNTLTTGKRPERDGFQIRRESVENGIPVCTSLDTAEAILRVLESRSFELESMNASEVKQPKSRV

SEQ ID NO: 407 - protein, 363 aa, Listeria monocytogenes
MTKRILMLEDGNYFIGDAIGSEKETIGEVVFNTGMTGYQETITDPSYYGQIITFTYPLVGNYGVNRDDFESINPAVKGVVVREAAEFASNWRNQITLNEFLKEKGIPGIAGIDTRKLTKLIRKEGTLKGILAAETADKEELLHHLRSVRLPVDQVHEVSSAKAFASPGDGKRVVLVDYGVKSSILRELNKRNCYVTVVPYNTSAEEILAMHPDGVMLSNGPGDPKDVPEALEMIRGIQGKLPLFGICLGHQLFALANGADTFKLKFGHRGANHPVKELATGRVDFTAQNHGYAVEKDSLIGTDLKVTHIELNDETVEGLAHKEYPAYTVQYHPEANPGPSDVNYLFDEFMEMMNGKEEGELHA

SEQ ID NO: 408 - protein, 426 aa, Listeria monocytogenes
MYVLKNGQVLNASGKLESKDVLIQNGKVNLIADSIEVTSGEEFDATGKLITPGFIDVHVHLREPGGEHKETILTGTKAAARGGYTTICSMPNTKPVPDSKEVMESIQAKIKETAKVRVLPYASITTSLGTDELVDFEALKEAGAFAFTDDGVGVQLAGTMYEAMKRAAALDMAIVAHCEDNSLIYGGVVHDGIFAEKEGLKGIPNIAESVQIARDVLLAEAAGCHYHVCHISTKESVRVVRDAKRAGIRVTAEVSPHHLILDEEAIPGNDGNWKMNPPLRSKEDRAALLEGLLDGTIDFIATDHAPHAAEEKNVPMEQAAFGIVGLETAFPLLYTHFVKTNEWTLKQLIDWMTVKPAECFKLPYGKLEEGSVADIVVLDLEKEANIDPDTFYSKGKNTPFVGETCIGWPVATFAEGTLVYNEGEIK

SEQ ID NO: 409 - protein, 303 aa, Listeria monocytogenes
MKNLLSMEALTVHEIEHLLEQAAQFKRGKKATFNEQTFAVNMFFEPSTRTHTSFEVAEKKLGVEVVSFDAASSSMTKGETLYDTLLTMQAVGVNVAVIRHSEENYYAGLEKLDIAIVNGGDGCGEHPSQSLLDLFTIKEQFGTFQGLKVAIAGDIRHSRVANSNMKVLKRLGAELFFSGPREWFDESYLAYGTYLPVDEIVEKVDVMMLLRVQHERHSGTDEFTKESYHEKFGLTEDRAKKLKEDAIIMHPSPVNRDVEIADSLVESEKSRIVTQMTNGVFIRMAILEAILKEQEMRAKLCTY

SEQ ID NO: 410 - protein, 428 aa, Listeria monocytogenes
MTETTETVTKPVLDIHERPSFNKWIILSIQHLFTMFGSTIFVPSVTGLSPGVALVSSGLGTLAYLGITRGKIPAYLGSSFTFIAPITALLAAKSGGGPGAVMVGTFSVGVVYAIVSLIVYYAGVDWIQKVLPPIVVGPVIMVIGLSLAPSAAAMAMGTNNGKYSLETLAVAVITLLATIIAMMFFKGFMGLIPILFGFTVGYLTSMAFGMVDYTLIKNASFFQIPDFSIPFVNIDPVITVTVILSMAPLAFVTMAEHMGHQLLLNRITNKNFFKDPGLHRSLLADGTASIIASFIGGPPVTTYGENIGVLAITKVYSVFVIGGAAVFAILFGFIGYINAVITSVPTAVLGGISLLLFGVIATSGLRMMIENKIDLSVNRNMIIASVVLVVGIGGLTIKSGTFELPGMAMAAIVGIILNLVLPAEHRSA

SEQ ID NO: 411 - protein, 183 aa, Listeria monocytogenes
MQKQVVVMDEAAIKRALTRVSYEIIERNKGTKNLALVGIKTRGIYLAERLHKRILEIEGIDVPVGDIDITLYRDDLSFKDDKTREPAVHGTNIPFDINGKKVVLVDDVLYTGRTVRAAMDALMDVGRPAQIHLAVLADRGHRELPIRADYVGKNIPTSGNERVEVRLTDVDHAEDAVIINKNE

SEQ ID NO: 412 - protein, 76 aa, Listeria monocytogenes
MAISKAKKKRQKLIREGHLNPEIKRSPFALIDLSSKQTKTKKGYLYSKKRKNHQKDDSFFVYFFKFSHFLHINSLK

SEQ ID NO: 413 - protein, 153 aa, Listeria monocytogenes
MSSKNQDLGHSVIKAFMNFKHAEIKSFQIPGYSKSETRFIFILSRGLKSRGPKIRVSDLGHMLRISKPSVTQMIQSLEGKGLIKRVQNPEDKRSMYVELTEVGAGVSEKMLDEFQASFEDMQEFLGEDDMKKLITLLEKLTDYLNTKSENKEA

SEQ ID NO: 414 - protein, 570 aa, Listeria monocytogenes
MKRLKPYWLSITAVLVLTFGQVIGQLYLPTLMSNIIDKGVVTGDTDYIWSTGMKMLLISFASVILSVIVVYLASRISMGFGKELRDKIFTKVEDFSLQEFDKVGTSSLITRTTNDVVQIQNVLYMMMRLMVMAPIMLLGGIIMAVGRDAKLSLIFVVVLPLLLLLVVILGGKAMPMFKSLQKKMDKLNRVIREGLTGIRVVRSFNRNEDELEKFEEANADYATTAIKVNRLLSLMSPLMMLLMNLTSIAIVWIGSIFIGNGDMQVGDLMAFIQYAMQIMMSFMMLSAVFIMIPRAGASAERINEVLDMNAEILNPENPKTSTPPAKLSFEHVTFRYEGAEKPVIEDITFEANAGETIAIIGSTGAGKSTLINMIPRFYDVESGVVKINGIDVREMDQSSLRQKIGLVPQKAVLFTGTIASNMRYGKEDATDEEIWEALRTAQAENFVSKLANGLGSRVEQGGNNFSGGQKQRLSIARSLIRKPEIYIFDDSFSALDFKTDAKLREALKAETTEAVTLIVAQRITSVVNSDQIIVMNEGKIAGMGTHEELKESNQIYQEIMRSQLSEEEIA

SEQ ID NO: 415 - protein, 605 aa, Listeria monocytogenes
MSGPGPGGGMRMQTAAKPKNFKQTLFRLLGYMKPRSVAIIVVFIFAILSTIFNIFSPKELGKATTEIFKGVMSQDGINNDKIFNILMIVLVLYLGSSLFSFIQQYVMSSVAQRTVYDMRKDLKAKMARLPLKYYDTRSNGDILSRSVNDMDNIANTLQQSLTQAITAIVQMIGVLIMMLTISWQMTLIVLVTVPISIILVAIIAGRSQRYFGAQQRNLGILNDTVEETYGGQTIIKAFGQEKKTLVKFDEVNEDYFKAAKKAQFISGIMMPVMQFVGNLGYVGVCVAGGIFVTNGTLQVGDIQSFTQYVQLFTQPISSVANIANIIQSTIASAERVFEMMDEEEEKDEIPANVNQVAGEEHSIVFDHVKFGYTPDKPLMTDLNIHVEEGQMVAIVGPTGAGKTTIINLLMRFYDVDGGQIRMKGIDTRDMTKDAVREKFGMVLQDTWLFNGTIADNIAYGREGATKDEVIGAAKAAYADDFIRRLPNGYDTILNEEGSNISQGQKQLLTIARAILSDPSILILDEATSSVDTRTELNIQLAMGNLMEGRTSFVIAHRLSTIRDADLILVMNHGSVIEQGTHQELLDAKGFYADLYNSQFTGAQAV

SEQ ID NO: 416 - protein, 99 aa, Listeria monocytogenes
MYQSITANDLEQDLKKVPHNILDVRDADAFVEGHIPDAINIPINELPEKLATLDKEKAYTIICYAGGRSERASQFLAAEGFDVTNVMGGMGAFHGTVTN

SEQ ID NO: 417 - protein, 208 aa, Listeria monocytogenes
MTNVLFIKANGLPAERSVSVALYEIFLTEYKKSHPDDNVTELDLFEADLPYYDVTMMSGLHKEAAGETLSPEEKRLADIANSYLDQFLAADKIVMAFPLWNFSIPAQFLTYLFYLNQAGKTFKYTANGPVGLVADKKIALLNARGGIYSDGPMQSFEMSLNYVKNVLAHFGISEPEMVIVEGHNAKPDQAKDIISAGAKEAVELAKIF

SEQ ID NO: 418 - protein, 151 aa, Listeria monocytogenes
MEVKILKPCTERSELLYRMHLLSKEISHVFEQQTNMSFTKVEILFHIQQTPGQSQNRLREKLYIDSASITRHLKRMEEQGLIVRKKQDENKRYTYLFLTSAGEAELATLLLEKEKFQNGALEAFSEEEVSALLKSVTKMMNNVEKMEEKLK

SEQ ID NO: 419 - protein, 313 aa, Listeria monocytogenes
MKAVVIENYGGKEELKEKEVAMPKAGKNQVIVKEAATSINPIDWKLREGYLKQMMDWEFPIILGWDVAGVISEVGEGVTDWKVGDEVFARPETTRFGTYAEYTAVDDHLLAPLPEGISFDEAASIPLAGLTAWQALFDHAKLQKGEKVLIHAGAGGVGTLAIQLAKHAGAEVITTASAKNHELLKSLGADQVIDYKEVNFKDVLSDIDVVFDTMGGQIETDSYDVLKEGTGRLVSIVGISNEDRAKEKNVTATGIWLQPNGEQLKELGKLLANKTIKPIVGATFPFSEKGVFDAHALSETHHAVGKIVISFNK

SEQ ID NO: 420 - protein, 177 aa, Listeria monocytogenes
METRELKNGQIMMIRKATKEDSSNIITYLNEVAGETDYLSFGQGEFAFSIAEEAEYIEESDKNPGSVMLLCFIDDELASISQLIGHIKKRELHTSELAISIRKKYWGLGIGTICMEELIKYAKSSEYLKLIYLEVVTENKRAINLYKKFGFIEAGEIPALMQVDRRYLDVTMMYLVI

SEQ ID NO: 421 - protein, 80 aa, Listeria monocytogenes
MHPIEQLLANNNTTATDIESNTRLKEGSLQKIIDKDIRTSDISLRVLSQIAIFLNTGADIIAKQLSDIEVANDLAFLIED

SEQ ID NO: 422 - protein, 583 aa, Listeria monocytogenes
MKDLKDSFKVLYQFKTDYLKVTLLLTILQAFVIGPFIYYFFFFILRVIGVPGITDANLGEVFSSPVAIIMLLILALLILLFVYYELGFFIMMAIYQLRGESYTFFKIIQRLNVKAKYFLSYQAIYFLLYFFLLLPIAGLSLPITITENLYLPHFITDELMKTTTGTWLYVIAIAIIFYISARLVFALPYFIEDKSLKISGAIRKSWKYPQKHLFFMLLKWVLIIVAIGFLVSIIATIIMLPLLLVEKITPGIAVVIAGITLTILQVIGFFAAGIFQGIIAQLLVKNAFAIKEQPALVTRSQFPHKKRFIIVAIIIFIIFSSFNIYTVNATLYEPNTKIIAHRGDTMNAVENTVEAIESAAEAGADYSEIDIQETKDHQFVVFHDMTLRRLAGSSKRVADMTLKELQQTKVRSGDYSSHIASFDEIIKIAKKNKIDLLVEVKLHGGESSDMVERLVTLLKKEKVTDKYLVQSLDQPVIEKIEQADPTLETGIILALNIGNLPKTSADFIVLEDFSINKRLLTQAKQNNKMVFVWTVNKEKLMQMYLRKNIDGIITNYPKKAIELRESFNENDSLRSRIENRLGF

SEQ ID NO: 423 - protein, 164 aa, Listeria monocytogenes
MKKLKSILLLMGIITFALALTACGGTEDKASTEKIETAKAETKKKSNPNELGDYKVEILSSEVVKDFEGNNAIAIKTKFTNNSKENISFMVAIDQQAFQNGTQLETTVSADASMGGSEKDVQPGGTLEVTELYKLQDTQNTVDIEATELISFSKNSVKKSFELK

SEQ ID NO: 424 - protein, 330 aa, Listeria monocytogenes
MSFIRTFYGDIAPDQLGFTYSHEHIVCVPAYWQERNADDLLLDDKEKSQLDVQDFADLGGKTIVDATAVDYGRRVLDVAQISKETGIQIVGTAGFNKSFLWDGKIKPELKPIIGDFETYYEWIENTSTEKLTEFVVNEVENGLEGTPYKAGQVKFGTGYNMITPLEEKTIRAVARAHHETKAPIHSHTEAGTMALEQIEILKQENIPLEYLSIGHMDRNLDPYYHKQVAKTGAFMSFDGIAKIKYAPESARIAAILYLVSEGFEDQILVSGDTARKTYYKHYGHGPGLEYIAKKWVPRFIDEANEKGFDGEKLVKKFFVDNPARCFTFKK

SEQ ID NO: 425 - protein, 380 aa, Listeria monocytogenes
MGEMTLAFIEEQYKELDNLNNKENPAVLTRNTSTGELFVRKIIPSSFAPVIEQLKNLSSKYLPKIEVMIPKGNQLIVYEEYINGKNLADLMKTNAPFDTDEVTRLMLMLSDALTELHANAIIHRDIKPSNIMISSDGVLKLIDFDASRMFEVGKNQDTVNLGTIGYAAPEQYGYSQTDARSDIYSIGVLMLELLLGKNTLPDKEHATSLEKIAMQAGAFDPEQRYQSIQDFRTAVKNDSLGPSYVSELSDFTELDDSPTESAWKTPADEYENDFIPWYKHIPGFRTGTPWKMIVAVFGYMFLIFGLFSPPTEGVKMSHTVNFFSNFFLIVPAFVIFTNLCGIWSKLPLLKSPSPGTRKAGIVIYIIVCVSIYGIYNEIFS

SEQ ID NO: 426 - protein, 151 aa, Listeria monocytogenes
MDGEKETSKLLHELKKATNLRQVLDENEAEFKSSEMVTYLKELLAEKKLTKASVIRAARLHETYGYQIFSGVRRPSRDRTIALSFGFKLSGLEASRLLKYTEYPPLYAKNRRDAIIIFALDHGYTLDQTNDSLYDLEEALIETYKEEKPLI

SEQ ID NO: 427 - protein, 130 aa, Listeria monocytogenes
MLNEQTILQAATSEKNAGDFPKVVQSFKELGVTKYQFLVEKGVYVFWDEMDNQVESKLNGVSMPISEEISRDKLKDAIKQAQAGKIDFEIFIKLAGLAGVRLWEADLSAMKVTYIDNTGNDLVIEPIPSI

SEQ ID NO: 428 - protein, 246 aa, Listeria monocytogenes
MDIITYFLIALSTSVVGSFLGIGGGVILLPILLLMGVSQGTAAFSSALTVFTMAIFTCSIYYKRKQGNVGLALKIAVTSIPTTFIGAMVNQMLPEAVYRFLYGALIVVLLGIMIWKKKRNNEKPHFLSKYRIIPYVFGVIIGFLAGLFGIGGGPIVIPILLLIFMLNQKTASATSSYVTLLTSLASIGSYAIIGGSDFSIGIYMIPGAIIGALIGTRLNKLLDEKWIAILFNVLLIALFALNLIKI

SEQ ID NO: 429 - protein, 92 aa, Listeria monocytogenes
MKRSWPDFAAFLLTILTVTWIILTWGLHISDIVPGGEKGIWYKLIPLFLGIISTISVFFVKEKLVKWILLGFNILLLILIYFVYHIGEIGMF

SEQ ID NO: 430 - protein, 88 aa, Listeria monocytogenes
MDEPTKAVIYQILSKTEEQNATMDHLVFEMMQFPGAAAFTKNELLFGIYWLETYHYIFRMSENQTTRYYRTEKGHEKLAELELLKNKS

SEQ ID NO: 431 - protein, 147 aa, Listeria monocytogenes
MTAFDLEDFLTTAITDYAKEKVEAGTWDEEESLAKSQDSFNKLLYDGITTPNEYLYSIISGEKIGYIWFHVDETRSGKHAFIYDFVIFEAFRGKGFGTKTLAALDVLAKEMQITKIGLHVFAHNQTAIGLYNKVGFQNTDITMAKYL

SEQ ID NO: 432 - protein, 233 aa, Listeria monocytogenes
MKKTIQSVGVWGDSIMKGVLFNPEKNRYTLLKNNCIKRASEKLGLTFQNHSTMGRTITKGHEILTKDLAKDATNDIAIIEFGGNDCDFNWAEVAENPAAEHIPRTPINIFETQLLEMIARLKKLDIKPILMTLPPLHAKRYFDFITRDGLNKDNILQFLGGDVEMIYRWQERYSNTISRIAAETSSQIIDVRDSFLAEFHYENLLCADGIHPNEAGHIAMSRRFIQYASFHKA

SEQ ID NO: 433 - protein, 559 aa, Listeria monocytogenes
MWKKHKWLIIAVLLLVIYVAPLFILGGNSHVRIHDNLDSNVTWYKMVLDSGDYTAKVGTANIDQIMDDSVPRDSFDSEFVGIDWLYMIFSTPIAFAMSQLITRVFAFLGLFLWARDYLIKDKKYLVPIYFVSLAFALTPFWPSGMLSTLGMPLALWAFLNIRNNKRRIWNVVILTLLPFYSSLILGFCFFLVMVGCIWLYDVFKKKQVHIRFLLSMLYMGLIYVIVNYRFIYAMFLHPEPDSRSEFSLPNLSFLSSIRLSFKNFIFGHTHDQALAGYVILPILLLVLVLIIIKREWVKEKLFLWLFGFNLFLSFWYGFWWYRGWNVIKEHVEIMRTFNFSRFHFLQPFLFYGLFALAIVYLIKKGNWWRKLAYVAIVLQLIVVFANNSEIYYRTGNGSPSINQFYATEQMEEIKDYIGKPQSSYRVGSIGLHPSVSQESGFYTVDGYVNSYPLAYKRAFRKIIAGELDKSPVLEDYYDNWGNRCYIFSAELGKNYDFGKDSKKHIKQLDFNTEAFKKVGGEYVLSAVPIDNASEVGLQFEKAFDNKESYWKIYLYKATN

SEQ ID NO: 434 - protein, 175 aa, Listeria monocytogenes
MILLVIDTQKLIMTNNLYNFDSLVPNIEQLIATARKNKIEIVYIRHDDGPNTELTEGKEGFDIYKKFQPTTHERIFDKTVNSAFKGTGLLEYLKEKGTKKIVVAGLQTDFCIDATVKCGFEHGFHMIVPAHANSTEDNHFMSGENSYKYYNEWMWPGRYATCISMEETIKEMEHN

SEQ ID NO: 435 - protein, 676 aa, Listeria monocytogenes
MLSGRMVLIIKYLEGKSESSIRGISKKLEISERKVRYDIDNINDALTLNQLKPILKEGKGRLVIPADLAKLALEEKETYIFAPQERINILQYLLFFNVKKVNLEHLSKWMNVSRTTIKKDLLLIEEQLQKLNLQLVYKQGYRLIGNENALLNERVRILRDYIDFIPSEDIETNFYRKCMLGEMKVSLKNIDINGVNKWSKQLLKQMGWILNDESYYWYLANILVFCWYIKNDVTNPLKDAKLVLPIFNSQLIQGMEVILDYELSQEQLNILVGFVFFTNKYASLNEEMDLITTETIVNSLITSMSEELNLPFLEDAILYKGLLNHVAPLIERVRGNVQIYEDTFDVIPTEFLYILQATSKVVKTIPLLESVENESEISLLAIHFLASIQRNQREEKLHVLLVCGLGYGAIAMMKDTLNSEYQIAFVATIPEYMLKDFTAWEEVDLVITTAKVTTPLPKSTVKVSPVLKECDLVELEKQGLKKKNILTSYFAINKRLSFLDSTVKQQVISVIKEELGYGHVSIPNRKLGLSDLIGIDAIQITSESLTWQTAIQRATKLLSDNHFVLPAYAENIKQIQEELGFYSVKDEEFALFHGNDSQLVQMNSMALLINEQPVMFGEKQAKVIFILASKDKKEQIPAIITLTKMTYQTDFISKLEQAKNPIDADRIIKKYEEEVR

SEQ ID NO: 436 - protein, 150 aa, Listeria monocytogenes
MGVKIDFLSISNINVNTKEDAILQLVNVLEKADYLADKSLFEQDILERERTLSTYIGHEIGLPHAQSSGVKEPCVVVGKLSKPVKWTEEEEFVQIVFLIAVPRDNQNNLHLKVLSNLARLLMHEDFRTKLSKLDDIATVALLNKSVKEDN

SEQ ID NO: 437 - protein, 353 aa, Listeria monocytogenes
MRTLKFLQKHLMTATSYMIPFVVAGGILFALSVMLSGQAAVPDAGWLAKLNQIGAAGLALFIPILGGYIAFSMADKPGLAPGMIGAYLANEIGAGFIGGIIAGFLAGFVVIQLKKIKLAPSMRTLGSIFIYPLLGTLITGGIIVFLIGEPISGFMDWMTNALNSLSGAAKVPLGALLGAMISFDMGGPVNKVAATFAQTQVDTLPYLMGGVGVAICVPPIGLGVATLLFPKKFTRVEKDSGIAALLMGSVGITEGAIPFATADPLRVIPSIMVGSIVGNVSAFLFGCLNHAPWGGLIVLPVVDNRIGYIASIALGAVVTAIMLRILKKDATELDEALEEGQDIDDLDINFEDI

SEQ ID NO: 438 - protein, 102 aa, Listeria monocytogenes
MKIVAVTSCPSGVAHTYMSAESLELSAKKMGVTIKVETQGSSGIENKLTAKEIEEADCVIITNDVEIRESQRFKGKKVVKMSVSEIIKKSDALIKKLQTMFE

SEQ ID NO: 439 - protein, 422 aa, Listeria monocytogenes
LKLPIKKAVEALLKLQTTGDSATLIGVGPMSRNLLQASFELAKEDDYPLMFIASRNQVDADELGGGYVNGWNQFSFIDAIKEVAKEVDFDGLYYVCRDHGGPWQRDQERNDHLPTEKAMELGKKSYIADIEAGFDLLMIDPTKDPFEVGKVIPLETVLERTVDLIAFCEEERKKRGLPEIGYEVGTEETNGGLTSTETYEKFITQLKVELEKRDLPLPTFIVGQTGTLTRKTEQVGHFNFKNAYDLAQMAKKYGVGLKEHNGDYLDDVTLLEHIPSEITATNVAPQYGTEETRAYLKLVELEQKLVENGLIKTPSNAREVLLIQSIKSERWRKWMLDGQKDITINEIMQDDDLSLEILDIAGHYTFNDAMVKKEINTLYANLAANNIDGKRFVIDHIKRPIRNYSECYNLKGATTRIKQLAK

SEQ ID NO: 440 - protein, 234 aa, Listeria monocytogenes
MINLIFDIDDTVYDQLKPFENAFKTVFGKADHLKIENLYIKSRFYSDEVYHRVVRGEMPKAEMHVYRITQALSDFDYQITKKEAETFQHAYEQNQRKIELSPGIKEILAWAKKNEITMGIITNGPKEHQQHKINDLQINDWIPAEHTFISGKVGIEKPDKKIFKLVEEQIGINSAETYYIGDSFENDVIGSKSAGWKSIWLNRRGHLRPTEAAFQPDYCVENEQQLFAILQEIF

SEQ ID NO: 441 - protein, 138 aa, Listeria monocytogenes
MKFSKATNYALHTMVYLANLSPEKSVGVKELATKQNVSPTYLSKVLTMLVKAGFVESVTGVNGGYKLAEPASSISFLDVIQAIEGKGAFFHCDPKNHSESQPHCLIGEVMNKAEQQMEDYLSKQTVGSIVVEIEKHQH

SEQ ID NO: 442 - protein, 197 aa, Listeria monocytogenes
MKHHHNHHGEAGFKRKVDYLDRPERSEVLSPEDFLQAMPIGKTASILDLGAGTGFLTIPAAKLVDNTVFALDLDAKMLELIESKAKEAGLANVETLEASMDDIPLEANSVDVVLASLVLHEADSLADVLREVSRVVKTGGYFASLEFDTKGTDLKGPPMEIQISAEKLKEELAGFGFEVVKNWQLDEGMYVSIAVKK

SEQ ID NO: 443 - protein, 209 aa, Listeria monocytogenes
MKNKTTKKIICGGLATVLLSSSLVLPTTSLASTSKQKVQDYQQEETFSDSPLTELDNLIAEKYITFDSPLKQYKVNPSIGSEMTTEKIEAVNKQVAETNNLLTLATNDSSTNVIAVTPEGKETVVKRGLLKGAGVNKVTYHWNYARIRLSKNTVRTMGVGLSIAGIWLPLKVVSKVCASLGVGTGFVKHGIWFDYNYFSNLLLTGYGWQ

SEQ ID NO: 444 - protein, 177 aa, Listeria monocytogenes
MERKLVQEINLLENKKLVMNLNIVAIAIVLILTVLGIVFSGGFAITNGFMGIIWLFGGYAVAIVIHEAVHGIFFKAFRPEAKVKFGFKNGMAYAGSPGAFYTRAQFFIISIAPFIVLTGLFIFLRFLGVNEAVLYLIFALHTSGCVGDFYYCILLINQPAGIVVEDTDKGISFYSEG

SEQ ID NO: 445 - protein, 452 aa, Listeria monocytogenes
MNKILIAAASSGTGKTTVTLGIMHALKKRGLRVQPFKVGPDYIDTNYHQAITGVASINLDSFLIDDDAMLAALFEKHGQSADISVIEGVMGLFDGLGIDRDNSSTSFIAKCTKTPVILVVDGKAISTSAAAIVDGFNRFDPELTIAGVIINRVASENHFSLIKGAIERYTDVPVLGYLPKNAAVALPERHLGLVPKEEMTELETKWEVLGDLIAEHVDLDRLLAISKTGAKLTVHPPEIQVPDFSGMRVAYALDAAFHFYYQDNLDFIRSTGATLIPFSPLEEREVPDADFIYIGGGFPEVFAERLAKNKSMHESILAAHEQGKPIYAECGGLMYLGSSLEMEAESYEMVGVFDGVSKMTTRLRKFGYCIAEPLEDTLLGKKGTAIRGHEFHHSVFETTEPTRMKLTKKRDGETVKEWHGGYQKGNTFASYLHIHFYQNLAMITHMFGAIER

SEQ ID NO: 446 - protein, 305 aa, Listeria monocytogenes
LKRITIGNSALTASEISLGCMRMADLSREDANKVINTALENGIDFFDHADIYGGGKSEEVFADAIDMNATIREKMILQSKCGIRQGFFDFSKEHIIASVEGSLKRLKTDYLDTLLLHRPDTLFEPEEVAAAFTELEKSGKVRHFGVSNQNPGQIELLKKYVDQELIANQLQFSIMHTGMIDTGFNVNMTIDPSLDRDGGILEYSRLNNMTIQAWSPFQYGFFEGVFLDNDKFPELNKTIDKIAADKGVTNSAIAVAWIQRHPASFQTVVGTMNPGRIADIAKASDVTLSREEWYEIYRAAGNQLP

SEQ ID NO: 447 - protein, 626 aa, Listeria monocytogenes
MKDWMKQNWQFITTGISGILIVIGCLVGSDVGDFWTAIIFLSAFVIGGFEQAKEGIQATIKTKKLNVELLMILAATGASIIGYWFEGAILIFIFSVSGALETYTTNKSKREITKLMAFQPERAFRLLSNGDLEEVAAKELQLDDMVFVRPGESVPIDGVIVRGSTTLNEAAINGESVPATKTVGADVFGGTVNVSSAITVKVTQTFENTIFSKIIRLVETAQSEPSKTARFIERFEDVYVKAVLLFVLVMMFLPHFALGWSWNETFYRAMVLLTVASPCALVASVTPATLAAISNGARHGILFKGGVHLENLRGVKAIAFDKTGTLTNGTPALTDRLFAENVDKQLVINVVGAMERQSLHPLAAAITQDLEPEITEKLTEIEVTDVPGWGVQAIYREGNWQVGKAGFVGKEAAAAFSNGAFERLASEGKTIVYVAKDGVIQAMFALKDTCRPEAIRTIKALQAKGIKTIMVTGDNEQTGAAIQAELGMDYVVSGCLPEKKVDVLRELSVTYGSVAMVGDGINDAPALAHAAVGIAMGEGTDIAMETADVVLMKNDLEKIPYAYTLSERLHWITWQNICFAIAVILVLITANVFQLINLPFGVVGHEGSTILVILNGLRLLRSNRKK

SEQ ID NO: 448 - protein, 242 aa, Listeria monocytogenes
MKKINWTQWIALFVFASMGISVVFTIYEIFTAPIKQPATGPHVTLRGDYIFLLFEIILGIFILLLPSIIARRFKFEIPGLVYILFIVFLYGSIYLGTVQKFYSTVPHWDKILHTFSGAMLGAIGFSFVSLLNSNDKVVMKLKPGFIAVFAFCFAVTMGAFWEMYEYTFDGIMNLNMQRYNLSNGTPLTGRAALEDTMTDIIVDIIGALFIVIVGYFALKKGRPWMERFEFKRKNWKKEPKKK

SEQ ID NO: 449 - protein, 216 aa, Listeria monocytogenes
MFLDTGNLEEIKKALQFPFFEGVTTNPTILLKENRPRKTHIGSIQAKVVFVQAAGLTEEEIWEDVLRIQAIEPAEGTVIGLKIPAHEAGIKVIAKVRANFPNEIILATAIFSSEQGYIAALSGADYLAPYYNRMEVSGLDAAKTIEELRYVLDLQGLEDVKIMGASFKNSRQIMQALASGADTVTIGYDLFLQMMNKPLALESIEKFNEHHAALPK

SEQ ID NO: 450 - protein, 606 aa, Listeria monocytogenes
LILFYFLLIIGKFTFAYFQIFKDPNFLALGMDLLFIVLLLGLIHLFAPVRSHIYWYAGMSLFIGILMLVCVLYARFYNEVPTYHSFSLIGEVGVVKNSATSLLSGTDWLYILDIILLPFILYFNIKKGHEFPSFRLTSRVYGVSFISTLLILSGFTYFMMQQNIISDSKRAKRMGIFTFNISTALTGADHVKAADITAKNVNDIKGVSVKSNPDYFGAAKGKNLIIVQLESFQRNLTNVKINGQSITPTLDGLQNETMYSNQFFQTVSKSNTADAEWSVYTSTFPSGYYTNTQTYGDRVIPSMPRLLGKNDYKTATFHTNDASFYNRDEFYPAVGFDKFYDRKFFGDEDVIGFSPSDEVLYNKAFPILEEQYKNNQKFYAQLISVSSHMPFDIPKDKQEIDLPSDLKDTELGNYFEAVHYADKQLGEFIQKLKDSGIWDDSVVVFYGDHHIIKTDQLPEEQKKYVNRSTQLKAEPADDYRIPFFLHYPGMENPGEIKNVGGEIDIMPTVMNLLGIKTGDQIMFGTDILNSSNNYVPERYTMPEGSYFTNSYMYQPDESFETGAATNYDGTNKELSSDVKKRFDASRKLLQYSDSYVNNLPLRNEDK

SEQ ID NO: 451 - protein, 422 aa, Listeria monocytogenes
MVKITKYPAEPSDVKHYISGEKMKNDHHLHTVLTFDNHLNIDVLKRAVMQSTQKLPLLLCHFKETKKGAFWQESVFSAEDLVFLVETQAPETEVDRALVTKLSTENGPQICFTVVRTESTDQLVIIMNHMLADGAGFKEYLYLLSELYSNLLENPDYAAKLSLGSRSLKQVFDQLSRKEIKSIFTEKTKQKAVHNPTLPLKGDPKNPKIIWTKLPKENFSQILHYAKEHDATVNDVLFATMVRTVLQTTGQHEISIDCPVDLRKYLPSKTSSGITNLTANITCQISTDDDLTSFESTLQAVKKSLDPQKNSLAPLRIYYLLELIFKKKSYISAKKASGKMYSIPKTSFTNIGIIDEEKLVFEGSALTDCFICGSLKYAPFFQVAATTFRGELTLSTNLHGTMQDHAWQKEFLEKMISEFSSK

SEQ ID NO: 452 - protein, 205 aa, Listeria monocytogenes
VKKLVAWFNGLSKMWKVVVIIGAVFVVIIALTTGEDEGEQTKTKKDSNKVVKTASRPKLSTKDLALIKADLAEFEARELSSEKILKDTIKEESWSDLDFANDNINQMIGTMKRYQQEILSIDAIKRSSEASADTEAFKKIFKEWSEFKIERIQVTIDLLNGKKDSEAVFKKTYPNQIIFKKVRTNKLQTALNNLKVGYELLDSQK

SEQ ID NO: 453 - protein, 164 aa, Listeria monocytogenes
LKIQKLVLCAMLIAMCVIGANIKLMGSVAFDAAPAFIGTLLLGPMYGAVLGIFGHLTSALLAGFPLTLPIHLIVAGMMGVTMIAYGFTRQKLAEKNQLVAISVSSIVAFVFNCPLSLLALYPLMHQAVFVLFPVLAIGSVCNIFVAEVVYQVLPERWKRRIAGY

SEQ ID NO: 454 - protein, 281 aa, Listeria monocytogenes
MTYLVTGATGGLGGYALNYLKELVPMSDIYALVRSKEKGADLKAAGFNIRVGDYSDAESMKQAFAGIDRVLFVSGAPGNRQVEHENVINAAKKAGVSYIAYTSFAGADKSTSALAEDHFFTEKVIEKSGIAHTFLRNNWYFENEMPMIGGALSAGKFVYAAENGKVGWALKREYAEVAAKAVAGAGFPEILELSGPLMTYEELTKALKEATGKDFDVISSDDKGFVENLVSVGLPQPVAEMFLSFQHDIKNDQLDVTSDDFEKALGKPLTNRVDALRELLK

SEQ ID NO: 455 - protein, 161 aa, Listeria monocytogenes
LKGLKKMKYSIQFSDAIHILAYIEIFKNTNLLSSEIIAGSVKTNPANIRRIMSNLKKANLITTQTGKANPILTKPPEEISLLDVYKSIEGNTNLIHVDPKTNPDCIVGANIQQVLSSKYELLQQKIELEMDEIKLDSIIHDISVLESKDRPQNNEFITKFL

SEQ ID NO: 456 - protein, 2013 aa, Listeria monocytogenes
LIRKIFIGILSFTILIQTVIVSNFNVVYATTEEHKQEAIKLEKKSTNNNIICIKGAVKDKEYKLSLPKSFNLDEKKTGKEVEYNKEKNELTIIGTGEEITLYLLASQTGKYELELKEGDKVQAKLDLIIKNVDEEVAKTVEKSNRQLLRSSISDKLFLQADSSKATLANYTEQITFNYSINFLDGSTNLKNGKLVIDFNNSNLELVNYPKDTAANRNIKLTSYSALTGKLTINLVDNISSGAPFDIPIVVRAGYGAKPGLPMNLKATLSGENSSGGTYTPSEKTTTVNLEESSSNQDYSPITAGDNSWAFNLKELSYSLKPGGYTIQWPEIQKKSLENKSFKNLKLEYLKENGGDVISVNTADPYVIRFGEPFWSQLSTVNGKANVLVNDDEKQVVEYGPINANIYQKIQVSMAAKIPADGVEGTEYTGTVNVYDEDVFITSIKIKAEVADSATSIAVDSKVSKTSISEGDIFEWGFMPRVSSAAPGVNDLEIVAPIPEGIKALSYIPNNNSMASIKKLEYYQNGKWVSMAPQTSSGWDFSKIDQSVNRIEKLKLTSRDGIINDKDMPPYTHGTIRMQNIGVKAGESFTLRPESITYTDPDKTSKTIDTTTNSYGKNVQVVEKTSAPAKINGEVFLSSTAGTSGKGFGSTIFFNGDKIAQSVRLGSYGSKLENPYIFVVVPKGIDLETMRNFIQQPYRSTLNYTYAPANGTNTLYPKSSADVKGKETLSDGSTLYYWEAPDTGLAPGMENCEMLALDLVLKLNKANSGANKVEFGMGSMTDSSWNLNGAANSGLETKELSSELQSKLPGVTSTKYLSTTRTANIGVSNSIATKMKIKGSQDNDFVDVSANTGTTIPGKRVDYNLTFENNGTRSMKNLEIIDILPHKDDQYVLGTGPRGSKFSVIPTSEIEVLVNGKKSDSATLEYSTSYTPERFDTNGEDVAGDSWQIVAPTNMADVKSFRIKLPNTEFKVGDEITLNFEAIVPTDAPRNDEIAYNSIAYRIDKETGSGTSKLASEPPRGGVKSTNPSTDLNIAGNSFSDLNKNGVKDADELGLNAVKLDLYKKNNNEFEKVETVYTSSDALDKEKGLFDFNGLNNGTYKIAAHLPNKNADFITTGPNKIVKDSKDDSIGWITVNNSTEFTIDDLANGNPKNLVGIQIPIYMATPIKGAVVFVNKDGEPKITSYGQDYEIALFDKDGKEVQSAIKTNSKGEFSFNDVAIKNPADFKLKVTAPTGTNFVYSAKNPLFNMSTKEYTLNSVVPGVGGVAEIYITETSKPTTKIILDKAVTPNAITIESSDEATEVTNEWTLEDSDGTVVYTGTGNTIRIPNDEGTYIAKNTATDEAGNTASDEKTFDIDYTVPTLTVNQDASAEVNSTEANIGWIKPLNVAATDTHDGNITPVVDYSKVKWDVLGTYPVTVTATDASGNKATQTVNLRIVDTTSPTILITNNPLTYSIENMRKLTEQELYTAAGLIGGDNYDLAPGQAVQPNKQPMVFTSNFSTIFGDIASVKAGQYQVQVNLADSSGNQAIPQTITINVVDTVGPVIKADNVSYHVNTTKTEAEFFQDARLDVTDNNDDTTDLIITSNFAEKVNLNKPGKYEVTITATDTKGNQTTKEITVQVSKDKPVITADPKISYQGKIEVTEANFLSGVHAEVTDELDGDVKITSDFAEKVDFNKVGTYTVTLNAKDEYGNTAEPVKVSVSIFNKIAPTFNNADNKTIEAVNELPSLESIFKIEAKDYLSGNKLKVTYTPEQTIKGNVPGEYSIKVTTKDDSGNIAETTVTLTIKDTTGPSIKMTKSTKKLEVQSKEPNWITFFGIKATDIVDGDVTKNIKVDSSEVNLNKVGTYPIYFTVTDALGNESSKLKSTVQIVDTSSPELTIDKLEISYPTGKTISDKQFLQDIGTKVTNSYGTVKVTTNLSKIVDWNKAGKYKVTVTATNSSGGVAEKTILLTVKNSDSSFIAVPSKDDNKNKPAKNIPKTGDTLNTELIVMGMMLLLVGGWMFLRRKTKVKTK

SEQ ID NO: 457 - protein, 630 aa, Listeria monocytogenes
VKEKHNPRRKYCLISGLAIIFSLWIIIGNGAKVQAETITVPTPIKQIFSDDAFAETIKDNLKKKSVTDAVTQNELNSIDQIIANNSDIKSVQGIQYLPNVTKLFLNGNKLTDIKPLANLKNLGWLFLDENKVKDLSSLKDLKKLKSLSLEHNGISDINGLVHLPQLESLYLGNNKITDITVLSRLTKLDTLSLEDNQISDIVPLAGLTKLQNLYLSKNHISDLRALAGLKNLDVLELFSQECLNKPINHQSNLVVPNTVKNTDGSLVTPEIISDDGDYEKPNVKWHLPEFTNEVSFIFYQPVTIGKAKARFHGRVTQPLKEVYTVSYDVDGTVIKTKVEAGTRITAPKPPTKQGYVFKGWYTEKNGGHEWNFNTDYMSGNDFTLYAVFKAETTEKAVNLTRYVKYIRGNAGIYKLPREDNSLKQGTLASHRCKALTVDREARNGGKLWYRLKNIGWTKAENLSLDRYDKMEYDKGVTAYARVRNASGNSVWTKPYNTAGAKHVNKLSVYQGKNMRILREAKTPITTWYQFSIGGKVIGWVDTRALNTFYKQSMEKPTRLTRYVSANKAGESYYKVPVADNPVKRGTLAKYKNQKLIVDCQATIEGQLWYRIRTSSTFIGWTKAANLRAQK

SEQ ID NO: 458 - protein, 800 aa, Listeria monocytogenes
VRKKRYVWLKSILVAILVFGSGVWINTSNGTNAQAATITQDTPINQIFTDTALAEKMKTVLGKTNVTDTVSQTDLDQVTTLQADRLGIKSIDGVEYLNNLTQINFSNNQLTDITPLKNLTKLVDILMNNNQIADITPLANLTNLTGLTLFNNQITDIDPLKNLTNLNRLELSSNTISDISALSGLTSLQQLSFGNQVTDLKPLANLTTLERLDISSNKVSDISVLAKLTNLESLIATNNQISDITPLGILTNLDELSLNGNQLKDIGTLASLTNLTDLDLANNQISNLAPLSGLTKLTELKLGANQISNISPLAGLTALTNLELNENQLEDISPISNLKNLTYLTLYFNNISDISPVSSLTKLQRLFFYNNKVSDVSSLANLTNINWLSAGHNQISDLTPLANLTRITQLGLNDQAWTNAPVNYKANVSIPNTVKNVTGALIAPATISDGGSYTEPDITWNLPSYTNEVSYTFSQPVTIGKGTTTFSGTVTQPLKAIFNVKFHVDGKETTKEVEAGNLLTEPAKPVKEGHTFVGWFDAQTGGTKWNFSTDKMPTNDINLYAQFSINSYTATFDNDGVTTSQTVDYQGLLQEPTAPTKEGYTFKGWYDAKTGGDKWDFATSKMPAKNITLYAQYSANSYTATFDVDGKSTTQAVDYQGLLKEPKAPTKAGYTFKGWYDEKTDGKKWDFATDKMPANDITLYAQFTKNPVAPPTTGGNTPPTTNNGGNTTPPSANIPGSDTSNTSTGNSASTTSTMNAYDPYNSKEASLPTTGDSDNALYLLLGLLAVGTAMALTKKARASK

SEQ ID NO: 459 - protein, 183 aa, Listeria monocytogenes
LEKEKVVNIQPLMDSQVESQFTQQIQEDFNKKNPDHSALLHSLETVEVLDVLSDYYTAHEKQKQPPKETTSPSKSNGEHKEIKQAIRYIKKNIHRSITLEEVANHVYLSPFYLSKLFKNELNINFINYVNEQKMLYAKEQLEKSDWAVHTIAKNLGFSRASYFCKVFKKEFKMTPKEYRDSLK

SEQ ID NO: 460 - protein, 248 aa, Listeria monocytogenes
MTIKNKVIIITGASSGIGKATALLLAEKGAKLVLAARRVEKLEKIVQTIKANSGEAIFAKTDVTKREDNKKLVELAIERYGKVDAIFLNAGIMPNSPLSALKEDEWEQMIDINIKGVLNGIAAVLPSFIAQKSGHIIATSSVAGLKAYPGGAVYGATKWAVRDLMEVLRMESAQEGTNIRTVTIYPAAINTELLETITDKETEQGMTSLYKQYGITPDRIASIVAYAIDQPEDVNVNEFTVGPTSQPW

SEQ ID NO: 461 - protein, 189 aa, Listeria monocytogenes
MIEQDLQNRLVDQEILHGSDLLDEIHEVKQNNEQLIIELNTKYHTKKEVTKYLSDITGKPVDPSVDVSLPFYSDFGKHITFGKNIFINLNVTFVDLGGITIEDNVLIGPGARLVTVNHLVSPKKRRGLRVAPICVKKNAWIGANTTILSGVTIGENAIVAADATVTKDVPPNVIVAGSPAKQIRKIIEE

SEQ ID NO: 462 - protein, 291 aa, Listeria monocytogenes
MELRVLNYFLTVAREKTISRAADVLHLSQPTLSKQLKELEEELGVTLFIRGNRSITLTEDGLYLANRGKEILSLVELTTSNLLQNETISGKIMVGAAETRGFEFIGSLLHELREKHPDITFQLHSGNADDVLEKIEHGLLDFGLVINPVEKLQYDYLPLTIEDTWGILVNTKHPLAKKTVVTPSDIEANPIVVSNQSFIDNQLASWLGGHFEQLNVIGRYNLLYNASLLAKENIASILCIDGIINTENTNLKFIPFSPPLTAGLSIVWKKNQTFSSASKEFLRLIQKTCSK

SEQ ID NO: 463 - protein, 860 aa, Listeria monocytogenes
MVKAHIVNHTHWDREWYFTSADALVLSEQLFTEVIDELKKHPEANFVLDGQLSILDDYVALYPEKLADIKQLIADKQLFIGPWFTQTDAFFAHGESILRNAMIGIFDSKKYGDYMKIGYLPDTFGFNAQMPTLLEHAGFDNVIFWRGIHLGEHVASPYFKWQGLGEEASIYAINMPQGYGTGMLLEPTSAYVDGRLDPAIDFIEKYSKTTEVLIPSGNDQLNIISNFAEKLAEINKMGRHDYQLSTYQDFIQYVRELPDLEKYRGEFRSPVLARVHKTIGSSRMNIKLKSASLEQKLLTRIEPLLVIAKASGISISERLLMYTWKKLLEGQAHDSLAGCVSDPVAEDILHRMKEADELCDSIENTIVKKIADDLALAANEIIIFNTDLHDFDGFKEIQVVTEHKKIHFPAFPDATIVQEEFIPSRENVLEETPAGNRFIEEPGYYVLQVRVKVELPGLGYRVIAFEENDRELDGMVASNNATIQNESYKITFQDGEILLQKPNGERLTSFITLEDDVNAGDTYDYSPLAGDVAELFTFSAANTEKSSEVERLILTGKSDFPLDRLTKEGHGNLQIKLILEVKKGSELLDVKVEVDNQIKNHRLRLKVNTGVKTDYNIASLPFGYIERKPVVPANWRETYSEMPIDIEPLEQSVTLTNETASCTVFTCGVKEYQQLDQDLALTLLATTGQLGKPDLAYRPGRASGDTTKKGHVLIETEGAQLLGKHQFRLAIYLGDQAFDEHKTAERTKTFNQANVSYQRQPFNHFLHRLDNKIQKTERKLGAKQTLAMLNLPKEYLVSACHPSYYTADKYIIRLENPTNTPQKLAFPDMSFEYVNAIEEVVANDNNTIPAYGAVTLRLDI

SEQ ID NO: 464 - protein, 368 aa, Listeria monocytogenes
MFRKIGSELKKHVLTGISYMIPLVIAGAVIMAIARVGGSFFGITDIWDAKYADSANSLISLLHSLDGFGGLALGMMFPVIAAFIGYSIADKLALAPGLVGGLLARDIGAGFLGALAAGLIAGYTCLLIKKYVKLPKAAASIVPVFLVPVFGTLITVLIINYVVGIPFADLNTALENWLNGMSGSNQIMMAAIIGAMVGFDLGGPVNKAAVTTAMALLTSGIYAPNTAAQVAIIIPPLGLGLATLIAKRKYNTEMREAGKSSLIMGLVGISEGAIPFAVESPLKVIPATVLGSAVGGALAVGLGAINQAPISGFYGWFTVENWPVYILAIAVGTLIVAGMSVALRKASAGEEMVGSSYDDEIDEAEWEA

SEQ ID NO: 465 - protein, 483 aa, Listeria monocytogenes
MLTKIATYGCCATRDLFNKAFVSDWKNHFQLVSYQQHCSIVSLMSKPIDIELGEELLGELSNFEKSVFKQDVLKSFLETLKTTQPEYLVLDFHVDTFNGFIELTDGGIITNRIVRYKKLDIFNKMEARKVFSPLENTTEFRKRWIQSFNRFMQFMKENCPNTQIIINRLEVARMYYSLDNQMESMIERRKTKDHHTAETLAKIDECIDYFERYAMNNFDLQSLDFNSEEYFGAENNPWGTCYMHYNPYYYKKKFKDLWNIVENHFHAPTKLASFAPGGLAKQIPLGVTKLSDMDEVGVYYLTNATYLQMEDRPTTDNAGYFFIVYPRNGKNGYMQELRKSTAAFSIQIFVRITDGKESSKWNMVNSGFRTLTIPDVTSISEITEAGEYYITAEQVKKLQDHPTKKNGWFLTVSKKNHDSLKQLLTKNTQNDNAFEEYVRLVNVEKRTNLKWRKYHFDEANFSIIVAIRNFKNKVVRRLKLTKA

SEQ ID NO: 466 - protein, 106 aa, Listeria monocytogenes
MKRKIIAVTACATGVAHTYMAAQALKKGAKKMGNLIKVETQGATGIENELTEKDVNIGEVVIFAVDTKVRNKERFDGKVVLEVPVSAPIKDAEKVINAALALIDEK

SEQ ID NO: 467 - protein, 154 aa, Listeria monocytogenes
MEVKDILTKELVVFDLEATTKETAIEEMAEMLDERGILADKATYVQAVLEREAHSTTGIGNNIAIPHGKSESVTKSAIVFARTKEMIEWESLDDEPVNMIFLLAITDSDKTDGHLKILAEIATKLMDDDIVESLKNTRDKEEVIRILNGGVVEI

SEQ ID NO: 468 - protein, 653 aa, Listeria monocytogenes
MKAVTKMIANREKNIIQFLMKTGQTRVGTIANHLGLSEKTVSNSLKEIDVFLKDFDMTVVRKPKIGVYIEGDNKAFAEVSRFLDNQVSQIPSTKEERVIYIFSKLLKADDYITIHQLADELYISRSTIEKNMVEVTKMLEKEGITLYKKPSKGMKLLISEREKRALTSKFITNFWGNNWYLKQEGEKVLQAFDTIQADVTGIFPEEGLKEIIAIVQEFSERHDFTFTDYAFQSIVIHLAIAVERIREGEYVENVESDPMKDVFESQRNNTEILVGMLEERLDIKIPAFEVGYIQLHLTAAYNQQHDELLVNTPPQEDDVADFVSRCLAEGNYDKGLLEDLTTHMKSAINRLKLGMHFKNPYLSKIKQNFPQAFEEALYFKAKFEQKYDVQVNEDETAYIALHFEAYKERSRSFPDQIRVVLVCSTGLGSSRLLAARIKKYFPMITIEKILSVQALMETEVDVDLVISTIYLELEDIPSIVVSPMMSKADLQQVESQIERTRRKKKKRSQPFVDLIKPKTIFAKLDVATMEEAIAEIGDKLVEQGIAKPGIVESALKREALSFTSFEEMATPHAEPALINESRIAIATLKHPVKWGLVDVDKIFFIALTEQNGINLDAMYEQFYKYIDNKKWLEKLTQLKSAAEIYEHLLKDGM

SEQ ID NO: 469 - protein, 285 aa, Listeria monocytogenes
MSIYLIALLPVLGWGFMPIIANLRKSTPEEQLLGTSISALLFALILFWILSPEITVLSFIVSFISGIFWSFGQLLQFKGIAASSVAKAMPISNGTQLVGATLFAVLVFREWQTVTAVIIGVVAVILILIGVVMTGFQKRGNHITESVSFHVYGIVILSSFFLTLYVVTNQLFDVTGFSIILPQAIGMLTCAIGINLAKKTAISRKNVTFNLMTGLSWSIANLGMFLATAVLGVATSFSISQACVIVATIGGILIFKQKKSPLEWTFILSGILLIMVGVVFLSLLK

SEQ ID NO: 470 - protein, 182 aa, Listeria monocytogenes
MTELEEIGIHINSIENTEQIISQLMDNYSDDVLHLVFSYVKNRTTAEDLTQEIFIKCYEKLDQFNNKSSIKTWLYRIAINHCKDYLGSWHYRKLNFNDKIWDYLPSKSKHVEEEVIAKDVANSLMSAVMDLPVKYREVVFLHYYEELPLANISKITGVNSNTLKTRLKQARELLKNKMKKEV

SEQ ID NO: 471 - protein, 143 aa, Listeria monocytogenes
MDDPFYNLKDSIKKDFESFSFSEERKNAVKKTIRKKQSHLELHSWKIETLQNILDALQDEAKHGYEISTQLFQKNELSFKNNEGQLYILLHLLENKKILSSKWIEGKKYYSLTAKGKKFVATFELRDSKQHGSLKNLIEEASL

SEQ ID NO: 472 - protein, 147 aa, Listeria monocytogenes
MADISKELIEQLVKQVVLEKMGQSSKHVDPSGILSVKLPVVKVSEEDRLDTGNPSDVVYTKDLVTLEESKRLGFGLMEMKDTTFDWFLDYDEVDYVIEGRLDVVIDGRTVSAGPGEIIFIPKGSQIKFSVTGEARFIYVTYPADWQS

SEQ ID NO: 473 - protein, 416 aa, Listeria monocytogenes
MSSSTFEEYLGKVIANVKSKQAHSMIKKELSNHLEELSHSFQKRGLSIEDANKKAMQEMGDPSTVGRNMNQLHKPRMDWLLIALFILLAGISFLPIIGDVVASNSSFMKKQIVWLAIAVLALIGFLFFDYRKLKDLWMYFYAAALILFFTTFLVGIPLTGGGRWMSLWGIAIDSPAISLFLFFIAWAGIFTNANAFKGWKKLVMLLILFWLPVIFYTMLPQFVFSIMYFLCVLVMYIFYYRHNRFAIKVALGNLLVGVIFISTMILKYPSSYLPDTSIPLKDILSKAGWFGKGLHNNLILPEAHTDFVFPFLVYSLGWVFGIFLCLLLVVFILRISRNAFKTKDLFGRLLTIGGAILFTVPACWNILMGLGIVPIMVVPLPFISYGGSMLLVYAALLGLILNVYRRKDIVESTLVN

SEQ ID NO: 474 - protein, 270 aa, Listeria monocytogenes
MIRAISVDMDGTFLDGNGEYDRARFEKIYAELMKRGIKFIVASGNQYYQLKSFFPGKDEELFYVAENGAVIFHQGELRSVNRFDERLVQKILWTLIQDYHDLQVILCGVKSAYLLKAADPDFKAFAKKYYFELQEVESFDVLPDDTFIKFALDVEVAKTGQIVEDLNQTFVGEIRAVSSGHGSIDIIIPGVTKGNAIQQLLNEWQVAPEDLLAFGDANNDIEMLQLTSNSYAMLESSPEVLAAAKHVAPSNKEAGVLQVIEEYMKKSQRF

SEQ ID NO: 475 - protein, 184 aa, Listeria monocytogenes
LSKGRLEAFSDGVFAIIITIIVLGMTLPDVFTAASTQAFLWEIFIFIEGGLIIGQFWYSHSRLFDQVTFISTSAVLFNILFLLVLSLIPLFTRAIMQHPDMTAPIIGFVITILITSVIFQLLHHAVNGKDSGIDNWKFRISSFIFVIALGIISFFAPQISTILFIIFPIAGWIIQLTNRRQPPK

SEQ ID NO: 476 - protein, 99 aa, Listeria monocytogenes
MRSLDAVEILRRGETIERYKEGGNSMLPLIKSMQPVRLEPIGMRELKVNDIVFCKVRGSFFTHKISKIRGKQYQISNNHKHVNGWITRNSIYGIVTKIW

SEQ ID NO: 477 - protein, 136 aa, Listeria monocytogenes
MKRYIINRGIMVAVVIIYMYPLLGIIKGEKIFGDIGTPIIMVIAALIGTLSSVFLSEEKTKREYEKEKLEKDERYINNRKTFSYYLLIVLALTIPIVLIVLNLYGIEQISISSLTIIFLIFCFAYMIVLEIIRKKV

SEQ ID NO: 478 - protein, 466 aa, Listeria monocytogenes
VKIRWIRLSLVAILIIAVVFIGVIGFQKYQFSKSRNKVIMQMDRLMKDQDGGNFRRLDKKENGVEIISYIPKTTEKKDNEIIQKEIGKATDAEVKKLNRDKETQGIIFYTYQKHRMAEQAISYKAVQSEYVKEGRTKFVLKDKKDICKNIVTDAETGALLTLGEVLIKSNQTKLNLKTAVEEELIKTGDFSLKDVGNLGKIKSLVKWNQTDFEITNSEIILPVKIPGAPEPKKVKVKLADIASSVNKRYLPSSVKVPEVPKAKTNKRIALTFDDGPSSSVTPGVLDTLKRHNVKATFFVLGSSVIQNPGLVKRELEEGHQVGSHSWDHPQLTKQSTQEVYNQILKTQKAVFDQTGYFPTTMRPPYGAVNKQVAEEIGLPIIQWSVDTEDWKYRNAGIVTKKVLAGATDGAIVLMHDIHKTTAASLDTTLTKLKSQGYEFVTIDELYGEKLQIGKQYFDKTDSRMVK

SEQ ID NO: 479 - protein, 269 aa, Listeria monocytogenes
LLNYLSSLNPVLLALLAGIFTWACTAAGASLVFFFKNLNKKWGNIMLGFAAGVMLAASFWSLLAPAIEMSKDLGKFSFVPALVGFLLGGIFLRVIDRIIPHLHFGFPEQAKEGPKTSLRKSILLVLSITIHNIPEGAAVGVAFGAVITGDTETLITAIVLALGIGIQNFPEGAAVSIPLRGEGLSRGKSFWYGQLSAVVEPIFAVIGAVLVVFVTPILPFALAFAAGAMIFVIVEELIPESQVEGSADLATAATMAGFAVMMVLDVALG

SEQ ID NO: 480 - protein, 601 aa, Listeria monocytogenes
MENYSHRFQVNLAGMIDILSNHLYDEKDVYIRELLQNATDAIRARKKIDSTLEGKIHASLTGDNNEKTLIIEDNGIGLTEDEVHAFLATIANSSKGEKNFDGESSNDFIGRFGIGLLSCFIVSDEIVMISTSQKDGGTTEWRGKADGTYSVRKIETDTREPGTQVYLRLRAGLEDHPECEDVEYLINTLKKYGASLESNIIVEMNGLEEEINSWTKQFSDKETLSTLSREQIIQYGEYILGTHFQDYFLIENESGRTFGIAYMIPHAVQMNAIRKNTVFLNKMFVTSEANNILPDWSFFAKCVIWTDELQPVASREAFYKNERLTSVASELGVALKKGIETLPEEALMKLLATHYLGFKALASEDAPFLKLIYPYLPVRTLNGEEKLGDIIAKNDVIYYTYSVDDFRQIKDIARSSGMTLINGGYSYDSPILAQLSYFVEGTEFVLIQPEEMTDKLRPMTADEKQAYQPILTEMNSMMAEFDTDVLIKHFEPKDLPIIFIHSTATQELRELERAVEETTSVFSDILESIQKEQEPAPLAHLYLNLDNELIKRLFTSEKTVKELSVIVNVLYIQALLLGHYPLKRKEMVLMNQNMLRILEML

SEQ ID NO: 481 - protein, 324 aa, Listeria monocytogenes
MDYLNDTQTVWGMEDTPEKIKVLERIITGADAHNDVESGIEARDMLIETCLTVGFPKKQLQAFSWLISKWEDEDNDVYIDSEDLLWKYKWISEHVPTFDEVSKAQIDGLLNDMKVKFEQENYSLRPYYKVCTLAAMRMGDVEKAKELYNKWSTTKADYLNDCPACERNDQVNYYCFVQDYEKAKEKAKPIIDGKQRCAEVPHLTYGNMALAYLDLGDAKMAQECFDKGYPLVEKQISLIPPLGQLLRYLVSTNQTEKAREVLDTNLEIVLQAEAGLDRLIFLQAAYPLFDREKEADLVEMTEALTAKFDARNENNYYQNRLEAY

SEQ ID NO: 482 - protein, 373 aa, Listeria monocytogenes
LSINEIIIYLMVIFMILGAIDKIIGNKFGLGAQFEEGIMAMGSLTLAMVGIITLAPVLAKILSPIVVPIYTALGADPAMFATTLLANDMGGFALAQELALTPDAGLFAGAILGSMMGPTIVFTIPVALGIIKKEDHKYLATGVLSGIITIPIGCLIGGLVAGFSPIMIFKNLVPIILVAALIMLGLWFKPEGMIKGFTIFGKGVVIVATIGLVAGAIQQLTGLTIIPGIAPIGEGIEIVGGIALVLAGAFCLVFVITKVFNKPLMKMGKLLGMNEVAAAGMVATLANSIPMFQMLKDMDERGKIINVAFAVSAAFVLGDHLGFTAGVAQDMIFPMIVGKLVGGVTAVAVGIYMANRMMKKNKAKEQTAVKDNG

SEQ ID NO: 483 - protein, 320 aa, Listeria monocytogenes
MDYLNALEEAWGMDDTSEKVKLLEQAIASADMYNDVESAVEARELLIETCLTAGFPKKQLKAFSWLVKKWEDDDSSVDTFDLFWNYKWISEQIATFDEIPKTQINRLLEDMKLKFEQQNYSLRPYYKVCTLDAMWMGEVEKAKQFFVKWNNTEADHLNDCRACETCAQASYYYFIKDYEKAKETATPIINGKLACAEVPHYTYGDMALVYLELGDAEMAQECFDKGYPLVEKQIALIQPLSYLLKYLVKTNQTEKAREVLDVHKEIVLQAESGMDRLLFLQAAYSLFDREKEADLVEMTETLTAKFDARNENSYYQDLLK

SEQ ID NO: 484 - protein, 248 aa, Listeria monocytogenes
MTIWVENENKGATEQTIHEKETEIGLILPTDYKQLLLKQNGGLIRKNHFPTSEPTSYGLDFGEIYYLGSLDELLTDIPEQKDVELAGKQVYFHRDESRYLGFSYMDNTSEPSIIYVDFETLQTLVVAENLAAFLEKLYFSPFPIDLAEHFPIKKLNQILAASNVQKTKQLLELLEDYPDKKWYLETLLGLLEKQEIPYNLVVCSLFENQLLYFRRKLVPELVEQIFVRLKACDGINKVTVAELYKEWN

SEQ ID NO: 485 - protein, 152 aa, Listeria monocytogenes
LVKVVFVCLGNICRSPMAEGLFRKEVANAGLTDEIKIDSAATGTWNLGKPPHRGTQEVLKKHGVDYQAMRARKISDADFKEADFIIGMDQQNLADLNALNNNPDVIIRSLMSFVSGQEDKDIPDPYYTGDFDETERMVTEGVKALLAYITKK

SEQ ID NO: 486 - protein, 246 aa, Listeria monocytogenes
MNQAIDAILGHYSVRKFEDKDLTEEALTLLIKSAQAASTSSFVQAYSIIGITDKDIREQISAIAGNQPYTVQTGQLFIFVADLARHHAILEEHQVDTAALETSEKWLVSVIDAALAAQNMAIAAESLGLGICFIGGIRNDVEQIAEILDLPPYTMPLFGLTIGHPVANKEKAKPRLPQDLVYHENSYKKMNPETLAEYDKQIKTYYNERTAGKRVEGWSEQIARGLGRPSRLDLKAFLEKQHLNQK

SEQ ID NO: 487 - protein, 169 aa, Listeria monocytogenes
MPNHIVLYQPEIPANTGNISRTCAGTDTYLHLIRPLGFSTDDKMLKRAGLDYWDNVKLSYYDSLDEFFEKNEGGEFYYITKFGRHVYSDIDYSDTNKDYFFVFGKETTGLPDALLQENEENCLRIPMTDHIRSLNLSNTAAILAYEALRQQNFGALLQEPNYDRKIFQD

SEQ ID NO: 488 - protein, 379 aa, Listeria monocytogenes
MVVKQKADYAALKEELIAYAYEIGIQKIGFTTADPFLFLKERLLEAEALDLFTGFEHPVIEERVYPELIFKEPQSIIAIALAYPSKLKEAPVSKKGARRGVFARASWGIDYHTVLREKLALLETFLIERLPDVRMKSMVDTGELSDVAVAERAGIGWRGKNTLLITPEYGSWVYLGEMITNIPFEPDTPASDLCGSCNQCVKACPTGSLLGEGKMNPKICLSYLTQTKDFLDEKYREVLHNRLYGCDTCQVVCPYNRGHDFHFHEEMEPDPELVRPELKPLLHISNRAFKEQFGDMAGSWRGKKPIQRNAIIILARYKDKTAVPDLIDCLQNDPRPVIRGTAGWALRKIGGRDAEEAVERALQTEQDVQVLQELTAIPN

SEQ ID NO: 489 - protein, 315 aa, Listeria monocytogenes
MEKSIEYSCIVPVFNEEEVLLKTYKRLTEVMQTLDGPYEIIFVNDGSRDLTKSMLQKLSAEDSCVKAIHFSRNFGHQIAITAGANYAHGKAVIVIDADLQDPPELIIEMVEKWKEGYQVVYAQRLKRKGETFFKKQSASLFYRILTKLTDINIPVDTGDFRLMDAQVCRELAGLHEKNPFVRGQVSWLGFKQTALHYERDERAAGETKYPLKKMIKLSIDGITSFSYRPLKLASYLGVLTAFIGFIYLIIVLFQRFFTDTTLTGWTSIIILQLVFGGTILFILGLIGEYIGRIYDEVKDRPLYIIEEENGFSDQK

SEQ ID NO: 490 - protein, 201 aa, Listeria monocytogenes
MTFWQDMMNFFSYDNLMYWLSEYRNLGPLLAFLLPFIEAFLPFLPFIVFVVVNVNAYGLLIGFLISVIAAIAGSLCVFLLARKFGQTRFLRFISGHKQIKRVMEWIDRHGFSPIFILLVMPFTPSSAVNIVAGLSKIKVYQFILALVGGKLIKVFAISYIGYDFVDLIHQPLKLAILAVSVVILWFVGKRLEHWMSGKNLK

SEQ ID NO: 491 - protein, 331 aa, Listeria monocytogenes
MYFIDNNNEKDPRINLAVEEFILTELNLDEPVLLFYINKPSIIIGRNQNTVEEIDTEYVEKNDVIVVRRLSGGGAVYHDEGNLNFSFITEDDGESFHNFAKFTQPIVEALKRLGVNAELKGRNDLLIDGFKVSGNAQFATKGKMFSHGTLMYDLNLDNVAASLKPRKDKIESKGIKSVRSRVANISDFMDQEMTTEEFRDLLLLYIFGVEKVEDVKEYKLTAADWEKIHEISAKRYGNWDWNYGKSPKFDLTRTKRFPVGAVDVRLNVQKGVITDIKIFGDFFGVKNVADIEEKLVNTTYKREVLAEALVDIDVKEYFGNITKDEFLDLLY

SEQ ID NO: 492 - protein, 181 aa, Listeria monocytogenes
MAEQSLGILELRSISKGYEMADVFLKAGNVTLFTFRPTCPGKFLIILQGASGELTSAMQDAKEEAGKFHVSSYILHMAHEELLAFLNNKHPKVEVDAVGIIEISQLGAGLNAVNEALKKSAIHLKRMTLGASIGGKFVAVFTGEVSAIQEGMRILIETAEPKKVIHHTVIPSPDELLKRYL

SEQ ID NO: 493 - protein, 243 aa, Listeria monocytogenes
MKLTVFGHWGGYPVANEGTSSYLLEEAGFKLLIDVGASAVSIMQNYIDPDDIDAAIISHYHPDHVADVGILQHIRLLSQKKEKPPVLPIYGHKEDERGYSYLEMANVTKVIEYKADDTLEIGPFKVTFLKTIHPVPCYAMRIEAAGKVFVYTADSAYQDSFIPFAESADLLVTDTNFFHDLAGKTKVHMASTEVAKIAKEANVKSLLLSHLPEVGDLEVLKQEAAAIYKGEIALASKGFTKTF

SEQ ID NO: 494 - protein, 222 aa, Listeria monocytogenes
MLKKTIAIIILIIGLLLIFSPFIKNGIVKYMSGHETIEQYKASDIKKNNEKDATFDFESVQLPSMTSVIKGAANYDKDAVVGSIAVPSVDVNLLVFKGTNTANLLAGATTMRSDQVMGKGNYPLAGHHMRDESMLFGPIMKVKKGDKIYLTDLENLYEYTVTETKTIDETEVSVIDNTKDARITLITCDKPTETTKRFVAVGELEKTEKLTKELENKYFPSK

SEQ ID NO: 495 - protein, 207 aa, Listeria monocytogenes
MEAMITKEFFESKTTIELARDILGMRLVHQTNEGLLSGLIVETEAYLGATDMAAHSFQNLRTKRTEVMFSSPGTIYMYQMHRQVLLNFITMPKGIPEAILIRAIEPDEQAKQQMTQNRHGKTGYELTNGPGKLTQALGLSMQDYGKTLFDSNIWLEEAKLPHLIEATNRIGVPNKGIATHYPLRFTVKGSPYISGQRKNSIRTGIWK

SEQ ID NO: 496 - protein, 653 aa, Listeria monocytogenes
MKDWKIKIQTFLSKNYGFFVLAVILYWLKTYIAYQLEFKLGIENLMQQILLFINPLSGAIFFMGLALFAKGRRSFIWIIVIDFLMSFILYANIVYYRFFSDFITLPNLNAKQMQNMGDMGSSITALLSWHDIIYFADIIILIALLAFRFVKPNKTARIRARKVVGVLTLGIAMFFGNLGLAEIDRPQLLTRTFDRNYIVKYLGMTNYQIYDAVKSTESSTQRALADSSDVTEVLNYTKSKYAAPNPEYFGKAKGKNVIYIHLESFQQFLVNYKLNGEEVTPFINSFFKDQNTLSFTNFFHQTGQGKTADSEMLLENSLYGLPQGSAFTTKGQNTYESASAILGQQGYTSAVFHGNYKSFWNRDEIYKQFGYDNFFDASYYDMNEADVSNYGLKDKPFFKESEEYLSSLQQPFYTKFITLTNHFPYPIDEKDASIAPATTGDSSVDTYFQTARYLDESVKSFVDYLKKSGLYDNSVIIMYGDHYGISDNHEEAMTKILGKDYNTFENAQAQRVPLMIHVPGVQGGVQEQYGGQVDLLPTLLHLLGVDNKEYLQFGTDLLSKDHKQLVPFRNGDYITPTYSMIGGNMYNQQTGEPIATETKEMKETKEKVAKELELSDSVLQGDLLRFYAPDGFKKVDPSKYNYNKKKSTDSSDK

SEQ ID NO: 497 - protein, 218 aa, Listeria monocytogenes
VDAEGDIIRQMLDLTEKETKMSEKQRRIVAASIELFAEKGYAGTSTNEIAKKAGVAEGTIFRHYKTKKDLLMAITMPTLIGGVIPFLAQSFVKEVFESEYPDFQSFIREIIVNRFDFAKENGKVIKIYFMELFYHDELRIQFSEIFMTHVKGQFDQMIDYYKERGEIVDMPNSTIMRALITNIVGFMLTRFVVMPDVEWDDAKEIDDTVAYIMRGLGK

SEQ ID NO: 498 - protein, 371 aa, Listeria monocytogenes
MRILAIVKRIINQFRRDKRTLALMFLAPLLLITLLTYLFEGDTVKPVVGVSGLSDSMVKELKANDLTIKTYSENTDVTAKIKDANLDAFFKQNGEKLEVTYENSEPSLSKEIGLKLQKALMTEQQAQAKNQAKATGEALAKAGIDPNSIPTLTASPEKLTLSTDYVYGDKDTSFFDTISPIFIGFFVFFFVFLIAGISFLRERTTGTLERLMATPIKRIELELGYLIGFGIFALLQSILVAVFSIQVLGMMQNGSLFYVLLITLTLGMVSLALGILLSTFANNEFQIVQFIPIVIVPQVLFCGIFPLDGMADWLVWIAHIMPLYYGANALTSIMVKGEGFASFATDFYILLGFVLVFVILNIFALKKYRKV

SEQ ID NO: 499 - protein, 432 aa, Listeria monocytogenes
MEIITWIANNFFGTPAILLGFIVLLGLLLQKKNLSQVISGTFKAIIGFLIINAGAAVITGSLGIFEPMWKEVFGLETPPLAGFLGQEAFNAKFGSAVTLAMTLGFLVNVLLARFTPFKYIYLTGHMMFWTTTIFAGITVQAVGGDIPFWGLVLFLAVIMGLYWTLQPAITQPFLRKITGNDNVALGHTSSSVAILSALLGKVFGNKKNDAEHINLPKKLEFLRDSNVITALTMGILFVVGAVILMVKKTPGAEELIAEAGNQSFIVYSIVQSFTFAAGIAIVLVGVRMFIGEIVPAFNGIATKLVPGAKPALDAPIVYPYAPNSVIIGFVGAFIGAIIWLVVLGNTVGYVFVPTMIVLFFHGAVAGVFGNSTGGVRGALIGGFLTATVVAWGQYIMVTFFINTTVPDTAMWAADSDMFILGPIVSMLAKLFF

SEQ ID NO: 500 - protein, 89 aa, Listeria monocytogenes
MQIGKVTGSLWATRKDEKLNGLKLLLVEICTDETEDVRHSIVAADNAGAGNGDLVLVTTGSAARASTGDNTIPVDACIVGIIDSVERYG

SEQ ID NO: 501 - protein, 157 aa, Listeria monocytogenes
MSEIAIKVSNLDVKIGKKQILTDMTLEIEKGEIFGLIGPSGAGKTTLVKTIIGMEKATIGTTEVLGKVMPNLPVISKIGYMAQSDALYTDLTAKENLDFFASLYSIKGAAKKDRMNYAATLVNLQQDLTKKVNNYSGGMKRRLSLAISVLADPDVLI

SEQ ID NO: 502 - protein, 306 aa, Listeria monocytogenes
MNDYNHYFHFPREEWRKLEVSKDQILTAEELEEIRGLNDRISLQDISEIYLPLIKLIAIQYHEAIFIHGEKMEYLKKKESRAPFIIALAGSVAVGKSTTARVFKLMLDRWFSKTRQVELVTTDGFLYPNKVLEERGIMDKKGFPESYDRDRFAKFLTDLKANKEDVEIPLYSHFTYDVLDETRVIHNPDIVIIEGINVLQADQHESLFPSDFFDFSVYMDANEADIKKWYLERFFMLRETAFQDESSYFHPYTKISKQEAETFALGVWDTINGVNLKENIEKTKYRADLVLQKGTDHLISDIYLRK

SEQ ID NO: 503 - protein, 279 aa, Listeria monocytogenes
MFRVFILFGFGFYLMQLHISGDISKYINMKYAYLSFSAMIAAFLLAIIQLIMVFRDEDIGAKTEHMGHTHDGENTILKKIMVYGLLSYALIAGFLFPVATLDSTIVSAKGFHFPKNNAAGDDPYAQNQFLRPDTSGYFGETDYEKMMAKEKAEIIDQNPIKVNDSNYLMTMEILYNYPGEFTGKQIEFTGFVYNDEVTKDNNLFLFRFGIIHCVADSGVFGMLVQMPEKTNLKNDTWLTVKGTITQEYYSPFKMNIPSVQVESYKEVAKPKSVYVYRKY

SEQ ID NO: 504 - protein, 346 aa, Listeria monocytogenes
MFSHLPDSFLQMNTIFISILIEALPFVLIGVFIAGFIQMFISEQFIAHVIPKNKFLAVIVGSLIGVFFPSCECGIVPIVRNLLAKGVPLHAGIAFMLTAPIINPVVLFSTYVAFGSTWEVPLLRVAGSLVVALVVGNIIAYLYKGTGLKDRFLKYEAASEKVAVPAANIALAGGPVESATTNFQVLTTEAVPAEVAHTNHAHHHHGEEHTHTKMTLSQKIWHTVQHAVDEFFSVGKYLVFGALIAAAMQTYIKTSTLVSIGHGPILSILLMMVLAFVLSLCSEADAFIGASFRSVFSTQSIVAFLVFGPMLDIKNLMMMLGAFKAKFVLLIVTSVTIVVFLYALVI

SEQ ID NO: 505 - protein, 523 aa, Listeria monocytogenes
MSTIEINQLKIEVADRVLVEIPHLLVSKKARIGIIGQNGLGKTTLMEVIAGAKEATSGTVTTQGKLAYIKQLSTDTSTKSGGEKTRKATQHAMRQNPSVLLADEPTSNLDVESVKHLERQWSDFHGALIIISHDRAFLDALCTEIWEIKNQKIHVYKGNYHAYLEQKQQQENQAELAYKEFKNKKKQLQASQTHHEIEAGRIVKPGKRLNNKEASAFKAGKGTQQKKQHSTIKALEKRIERLGNVEKPHTTKPIKIITPDNRVIKKGNTILSAKETAYEIAGRKLFETKAFSIKAGDKVALIGENASGKTTFLKEIIQENPNLLCNPQAKIAYFDQELNGLNQTKSLLENISEISVQTKQVNREVLGSMHFKESDLHKEVRMLSGGERVKLLLSMLLLSDANFLILDEPTNYLDIYAMEALETLIKQFAGTVLFVSHDRTFVNHVAEQLLVIENNEMNFHRMTFAEYEESKAPSRITEEDKLILEMRMSEIAAKLMQPNLKPTEKAILEQDYQEIITKRQQFS

SEQ ID NO: 506 - protein, 632 aa, Listeria monocytogenes
MDTQKEILAYLHKQENKWVTSNELAAFCECTTRTIRNNIYKINEVTPNLINSTKQGYQINLNIPFEFQSESDVTERKSKLLLELIKNSTKGVDLFELADILYISEVTLKKDIQQLKNELKEADVKIVISKDRIKLIGKERAKRKYMISLLYEEGGYRESIKSRIQEMIEFVSIDKLQNIVKEVLAQESITTNQYSMMNIVLHYAISIVRIQQGNTLIETQKTLIRKHSKEYEISKKIAKILSEEYQIHFSEAETKQLGLLYVGLQNEQSANANHGELDQFVDKKIIDALKIVLANVEETYLIDLQNEQLFIKLAIHVQSLYYRSRYKAYTRNLSLLDIKTSYPVTFDIAVYISSLLQEKLAIDFNEDEISFIALHIGSFLESENRDYIRLEIGLLVDDYHDLRTNMLKKLRARFDNEATIELIENEDYEENFDIILTTNRDVALEKAGSIFIHPLLTTKDIKKITSRIQTKKKILENNIRGQQIDRYIVRSLYSNQIDPSELTPAKIREQMISKMEKQTFVTPEFKEKVEKREQMAPTSFPSGIAIPHSIKNDALQSGVSIMTLQEPIYWNDVKVKIITLVAISKKDATEFNDFFEKFVEIVSEPINTKRLSMVESFEEFIRKLKMMMEESE

SEQ ID NO: 507 - protein, 483 aa, Listeria monocytogenes
MFENYQFPKDFLWGGAIAANQAEGAFKVDGKGISLADLHKYHKGKTNDEISEEQHKGVSLADIKASIEDKINYYPKRHGIDFYHTYPEDLELLAEMGFKTFRTSLDWTRIFPTGEETEPNEAGLKYYDQLIDKIIELGMEPIITILHYETPVEIVLNHGGWHNRKVIDLFEKYGKTVLDRYNKKVKYWIVINQINLIQFEPFNSTAIPYDAVDDYLSATYQAVHNQFVASAKIYEYGKALNPDLMIGTMLADCTAYPFSCDPDDIVLAMKRNRMEYFFADVQFQGEYPQYALNYFEENNIHIEITEEDKAILQKNTMDYLALSYYYSQMVDSKRNDLDPASITPNPHLKANPWGWAVDPKGLYNALSQYWDRYHKPIIIAENGFGMYDKLENGEIHDDYRIDYLSAHLKEMKRAMYGGVEIIAYCAWGPIDIVSCSSAQMEKRYGFIYVDLDNEGNGTGKRIKKDSFSWYKKVIESNGEDLEA

SEQ ID NO: 508 - protein, 116 aa, Listeria monocytogenes
MSEQDYVEETDSLNELSMNILIHAGNARNDLVKGLNHLEELEFNEAEEFIASAKREIVIAHSLQTDTLQLEASGNQIRYSTLFCHAQDTLMTAKSEILIGEHMLRLFKKMTELTKK

SEQ ID NO: 509 - protein, 190 aa, Listeria monocytogenes
MSMELDALIKAVTEEVMRRLQLPEKKMIIMGQDSEHTLRQCYLKEYQVSLYDRSERACDILLLEELDIAELARISLFAPMNKKEQFITDHLLAGRPTWIMKSGIKAHAYKRSAKYGIRQLFQEYEEKLSRFGVEFIESPVKETKESKVITEQDVEKLTKNKSEFILPKGSFLTPLAKDYLQENRISIKES

SEQ ID NO: 510 - protein, 422 aa, Listeria monocytogenes
MNNKVMDFMTNKFAPKVNKVVKNPWVSAIQDAIMSALPLVFVGSLVTIVSLLKNLFPGMPDFSMISNFSFGMFGLVVAFLIPYYLMEKKGNSSQKLISGATGLVLFLMLLFPTISADGDAVFILSRFGATGMFLSITTGLFVGCVMNFAAKRSFFSEDTPIPDFVVGWFNSLLPITFILIVGWLITVQFNIDFFEVIVAVFSPLASIVQSYPGFVLSVFIPAFLYTFGISGWVMMPAIYPVYMAGLAENSQAVANGASASNIATQETVYALISIGGVGTTLSLSIMMLILSKSLQLKAIGKAVIVPSIFNINEPLFFGAPIAFNPYLMIPTWINAFLVPSIAYFVMSMNLVSIPAQSFLLWYMPYPVTSYLATQDFRGVIACLAIIVITWLVYLPFFKAYDNSLLKQEKLDAVETEKEMVTN

SEQ ID NO: 511 - protein, 101 aa, Listeria monocytogenes
MKNILLICGSGASSGFMAAAIRKAAKKRGEQVTVKAASESQIDERINEIDYLLIGPHLAYMLDDLKQKVADKDVLVSIIPQATYGTLNGEKALDLILNMEG

SEQ ID NO: 512 - protein, 488 aa, Listeria monocytogenes
LSIKETALPKVQTKLFINGKWTDGDNKETKDIVNPANGDVIAKIAQAGPSETKKAIKAAKDAFPDWAKMELADRVKLLHKIADLMEEKADTLAKIMTLEQGKPLKESKGEVLTGVENFRFAAEEARRLYGETIPAPNNHAFIVKKQPIGVVAAITPWNFPGGMVTRKLAPALATGNTIVLKPSGDTPLSALAIFEIFEEAGLPKGVANIVMGSSKEIGETLTDSDDVRKLTFTGSTKVGQTLFKQSADTLKKISLELGGHAPFIVFDDANLDAAVNDLVAAKFRNNGQVCVSPNRIFVAKEIKEKFTKALVAKVEQLKVGNGLDDVNVGPLIREDAIDKIDKQLKNATEKGAKVLTGGGRLTGSDYDKGNFYKPTVLDNVTRKMDIFYEETFGPVIPLITFETEDEAIEMANDSEFGLASYFYTKDLARVEKVGAALEYGMVGANEIAISNPETPFGGVKHSGFGRENGHYGMEEYIQVKFINLKYRD

SEQ ID NO: 513 - protein, 270 aa, Listeria monocytogenes
VGYYSPQEVTEITIEKGTQKANSSTLTLVLLGFLGGAFISLGYLLYIRAVGTMPHEWGSFATLIGASLFPVGLVCILLGGGELITGNMMAVAIAWYDKKISFQQLLRNWAIVSVMNLVGAFFVAYFFGHFVGLTEGDFLPKTLATAGAKINDPFWVAFVSGIGCNWFVGIAVWLCYAAKDFAGKILGIWFPVMAFVAIGFQHVVANMFIIPAAIFAGYYSWADFIWNVIPVYLGNVVGGAVFVSLFYFLAYKKNAPKKVKEEIHQPIEEN

SEQ ID NO: 514 - protein, 167 aa, Listeria monocytogenes
MAIRLKRLEEWEGFTGIALVREGLKAEALHTEIKTAFKEILQLARELDDFSKQKIFYGISVHNIEDGITHYSAIPVEQKYSNLKEPLEWIEVPAHTYFVAEHIQDTDIGESYEEIARAIQEKNYKPYITANNPVFDPLPFKLEVYTKQGSDETNIEIRIPVVKELHT

SEQ ID NO: 515 - protein, 367 aa, Listeria monocytogenes
MEIIIYIFVSIAIISLQAITPFVIRKSECFGVNVGERANRNAELTQLKKQYVGQVILWTSFVAIIGIALIQGFHSSENTQAGIFIASMFSQLIVSFIIYYRFHHTTLQWKRDKIEAGEISTNSIIMVDTSFHRRKMVISYTWFIVPLLIFIITLAITVVFYSTAPVDFPIHFDMSGTVTDTVAKSPRVVLLLPMMQLGMIALFIFINFVIARSKQTVENENPTDSLKRNMLFRQISSKAMLIMCTIMVIDFLIMQVVTLLALPAEWMMVTMIISVVLILFGTVLLAVKVGQGGSRLKFADQPDGVNKPIRDDDSFWKAGVIYFNRNDPALFVEKRFGIGWTINTARPVAWLSFVIIIAVIILISILF

SEQ ID NO: 516 - protein, 130 aa, Listeria monocytogenes
MLLAIDLQSDEPIYTQICNQIIEGMAKRELLPGDKLPSVRSLGADIGINFHTVNKAYQILKQEGFIQIHRQKGVVIHPDGVAKADELFFTKLQTKLKPLIAESVVRGVTEEKWLEVSKAIFDEMHGRRVE

SEQ ID NO: 517 - protein, 378 aa, Listeria monocytogenes
LKFSRFRDSKLFFWTIEILAVVAILFVLLQMKYIFSPIGIIVSTLFMPILVAGFLFYLFNPLVLFLEKRKVPRLLSVIVIFIAFITLVVLAVMQLGPTLADQVAELAKAIPGYWQDFEKWLQGLSNNSALKDIDMKQELEKLNISLPKIMSVVVDGVASSFGAIVSFVSSFVMILVTVPFIVFYMFKDGHKFVESSGKFFPAGIRSEAKQIIKEMNKTISTYISSQAIDCMFVGLFTFIGYLIIGQPYALLFGFIAGATNIIPYLGPFIGAAPAVIVALFTSPVQALLVIVVVTIVQQIDSNLLSPYIMGKSLSIHPLTIIIILIVAGNLAGIFGMILGVPLYAVVKTIIVNVNRLIKLRRGQLAIDNNLPNPDTPKK

SEQ ID NO: 518 - protein, 213 aa, Listeria monocytogenes
MNNELITSLIEEVTRRALLETGVEVEASGRHVHLDRETVDALFGPGYELTHFRDLSQPGQYVCKERISIVGPKSVIHNVVILGPIRKKTQVEISSTDGTALGIKAPVRESGDIAGTPGILLLSAKNSVQLSEGLIVAKRHIHMTPADAEKQQVSQSEIVQVKINGDRPLIFDDVVVRISPDFATYMHIDYDEANACGFKKGIRGQIIKKTKAK

SEQ ID NO: 519 - protein, 224 aa, Listeria monocytogenes
MGKKLSLYFVRHGQTYLNKNLRMQGWADTPLTPEGIEIVKESGRGLAETEFVAAYSSDLHRTIATAGHLLKENKHAFGLTLEPLSEFRETFFGSYEGEKGDVAWNEIAHHMGYANQEELFQKADVRETMNGTKAADPTGDAEDFMTFWTRVEQGFLHVINRHRETGGNVLIVAHGNTIRNIVHELEPSMDEAVILDNASVTVLAYENGLFKLERLNDTSHFKKA

SEQ ID NO: 520 - protein, 449 aa, Listeria monocytogenes
MEKHYDYIAIGGGSGGIASINRAAMHGAKCALIEPKFLGGTCVNVGCVPKKVMWYGAQIKEAMDLYADAYGYQVDASFNFQKLVENREAYIERIRGSYKNGLDNNNVDWIKGYAEFVDEKTLRVNGELVTADHILIATGGEPALPSIPGAEFGITSDGFFALKELPKKVAVVGAGYIAVELAGVLQQLGSETHLFVRKHAPLRNFDPLLTDTLTEIIEQSDMTLHKHAIPQKVEKNPDGSLTLSLEDGRTETVDTLIWAIGRKPVIKGLQIEKSGVELLESGHIAVDKFQNTNVAGIYAVGDVTGHYELTPVAIAAGRRLSERLFNNKKDAHLNYENIPTVVFSHPAIGTVGLTEPEAIEKYGKENIKVYTSSFTSMYTAITDHREPCRMKLICEGKTERVIGLHGIGYGVDEMIQGFAVAINMGATKADFDNTVAIHPTGSEEFVTMK

SEQ ID NO: 521 - protein, 165 aa, Listeria monocytogenes
MANYINKERRQIDFDPFDLRIIAVPEVVAVQFKPRSEHTLLIRIADVGATYQPLKHESLFEAILPVHFNDINEEDDYWGLSDKEQAEMKLFNEVHRDLIYNFVDEHPDFTQIVVHCHAGVSRSSAVAMAIAEHLGDTDTYEKLQVIKRYLPNPRVLAIMRGEAYL

SEQ ID NO: 522 - protein, 224 aa, Listeria monocytogenes
MAEKTIVEKLQLAKYKEAVILNQPDGADYFQNLANYEEKLADKQYDLIFDFVETLEELITFVQKVIAENKLSVDGYLFFAYPKKGNKKFATYVHRDELMPALKTDEEGYVDGSTLKFTRMVALDETYTVVGLKEATKLKAKGVKKNNPSADEYADHVPLVAEFLADKGDLQVFYNNLATGYQRVWARYIYSAKQPATQEKRRLEMVDILSQGYKTKDLYRQGKK

SEQ ID NO: 523 - protein, 167 aa, Listeria monocytogenes
MTNRTLTTKLLGTLSYTQENGTMMDAVIPLDGKEVKVDYSIFEKLTSEDYFKDIVTLTDQIPELHLKAKKTILEQFDGNDTLTIYFDFHTDELPKEVLEVTECDALENVTKEILIDKLVLSGVWFSENANNELDLTFDFKLLPEVSDELLVVRFNTNGEITELTHES

SEQ ID NO: 524 - protein, 678 aa, Listeria monocytogenes
MASYGGKKRNNKKAIIIGSIVAIVVLAGIAIYFFIQNQHKDEKNALAAAETFTSNIAKEKYDKLGGSVSSESLKKVEFTKKEMEDKYQAVYDGIGAKNIKVKNLKSVYDDKENKFNLTYELEMRTSLGKLATQKYKTTISKQDDDWKIDWKPALIFPGMVKTDKVRITEDDAERGQIVDRNGNPLATTGQFAEAGVVPSKLGEGDEKVKNIADISKKLEVSTDYINKQLDQKWVQADSFVPLVTLNKDNLPEATGLTYAQKEMRTYPLNEATSHLIGYVGEVSAEDIEKNPKLSVGDVIGKSGLERYYDKQLRGKNGGAIKIINDQTKQEDTLQKIDKKDGEEIKLTIDAAVQKKAFDSLGSETGAVTMINPTNGELLALVSTPSYDANQMVLGITSEDYAKYNDDKRLPFLARYANRYAPGSTFKTITATIGLDTGITKPDKVREISGLQWQKDASWGKYFVTRVHDVPKVNMTDALVHSDNIYFAQEGLEIGKDKLTAGLKKFDFDKEYNLPFTMKPAQISNDGLNSEILLADTSYGQGELLMSPIQQAIAYSAIANDGKMPYPKLDTKEKAGKETQATEAKSANQVKAALVKTVSDPAGTAHALEIQGHSIAAKTGTAELKEKQGEDGLENGFVYAFDADNPNYLMVGMIENVKGRGGSGLVIDKLKPVIESMYK

SEQ ID NO: 525 - protein, 104 aa, Listeria monocytogenes
MEEMEQPEKKVIIRGKGIHNKWKWSTIIVSILSVIIISVLSYQLYSVSQNIPENNTNGTMQGPGGGEMPSGTPPSGEPGQAPNSSDDSSDSGTSDSTTSSDGTL

SEQ ID NO: 526 - protein, 309 aa, Listeria monocytogenes
MARHAQKRKARKGRIFVTILVALLILVGVVAVIGYFQYQSSLKEAQNESKLKDYKFNGAKAVGDEINVLLIGSDSRGEDQGRSDSLMIAHYNTKTNTPKLVSIMRDTYVDIPGHGKNKINAAYSYGGPELVRQTIKENFGVDVQYYVVANFEGFPKIVDTLAPEGIKINAEKDMSKNIDANIKKGEQVMDGKTLLQYARFRKDAEGDFGRIRRQQQVLEALKEQAIDVGDVGKIPDVIGKLQGYSSTNIPTGTLMSIGADFLLGKTETMEKFAIPVEGKWHNERIDGAGAVLRLDDMAANAKALQDFLK

SEQ ID NO: 527 - protein, 251 aa, Listeria monocytogenes
LAILTEDELRKAYLHTDLKTTKKLDIKKGTIITPSAKSFLSEKKIDLHYIDEIAETKVVLEPVKTETTRAKFQTIYGGALDEKPEHMTHLRGNLLVFKDHPQIAFRGKLDTLEAEILETQCSVAAEFKDLAEDLQEILTFVRNIVRAEVLNEQIESVNLLGMDEKELRERSHNPKKYYQMTHFMPDYTMGNAVIRLNKIRTMVRETELAAFLAFKEADYSIKRPDIIQALNRLSSLFWILMFRVRTGEYKK

SEQ ID NO: 528 - protein, 926 aa, Listeria monocytogenes
MNMVKNEWKKLFHNKVLLISFIAILFIPIMYASFFLKSVWDPYGKASHLPVAVVNLDETVEFQGQKMDVGNQLVAKLKKDDSLDWRFVSEKEAKQGMKDLKYYMIVTLPKDFSKNATTLLDENPKKMEIGYETNGSLNFIGEEVTKMAMEDLKAQVGTSVTKGYAETIFAQVGKLGNGIVQAADGAEQIADGGNKLSDGNKEITANLDKLANSMITFKDGANAFNVGLNQYASGVEKANNGAAQLDAGTKKLASNVGPLKNGIAALDTGANQLSSGVGQYTSGVNELNKGTSSALVGSSSLTKGLNDLNNQLPNLENGVGELQTGLEKLNTGSVKLKSGLETLDSNLSSPASKSQIAELQSGLNQFKTGITELNQQVNNTQLTTIVNKSKAIEPTINKIEEHLAALEALTSGNHSEQIIAKIEALETLVPEDKAKLINDIKPILDDLAQKQNEIIQMLHKDLEEMSQLLADVPDSIDEIEALQSGVSQLNNGFNGNPGIYSGTNALIDSMVDIQKAVGSANDQNTLLGGATVLHNGIADATTGVKELNEKVPSLADGVNQLTGGSQALNNGLKKINDGTTELDNKSGELNSGATKLANGMNAFSGQLPALSNGINALNNGAIQLADGTNELADKVPKLQNGAVALSNGAGEIQNGSAQLAAGSAQLGTGIDKLNTGATELSTKLAAGSQQMSQINPTNKNFNMFASPDKVNHKNYSTVPNYGAALAPYVMSLALYVGALVFNFVFPIRKISMRGQTSTAWWASKASVGVFVAIVMALIQATVMLVLGLHIDSLIQFYAMAITTSLAYMFIIMFLAMTFDNPGRFVAMILLIVQLGGAGGTFPMPLTNGFFNAIHPFLPMTYSIYGFRQAITSGIGMNVYFQSLLVLVGIFAVFIGLLWLGMKQLQKKHLEGVSQLDNNQELQAVED

SEQ ID NO: 529 - protein, 495 aa, Listeria monocytogenes
MKKDVYLAGDQSITVSMMLLRMIAEESRWYTVNELSERLDMNQRTMQRYIADLLEKIEDYNDPNIQLYTAKNKGVFLEITLGADVLNFELYLLEENVTIILMKAIFFEEFTSVKKFAMDYFLSETTIRRSLKYFQELLEPYGIKLKRETYEVVGPEEQVRMFFYSYFWRLYQGAIWPFDIVNHKMVEEATMKVTSSLRQNLTYVQQYQIEYVIAINIIRIRKRHLVELKPNWKNYLDLNNDFKSLTKIKAVFESLNIQKESEIYFFYLLMETRPKLYENKEVARRALEPHKKNNSDVYAATEVFIRVFSEEMAPIPQKKYDLFFNSSFSAHLFCTLFKYFSADINGYEYIRKFKEYYPKLHQKMDELLDILYEETGNELFLEKDFLLTRYGLLFSSIKRLTYFEEEIQIVLDTDLPKFAELNLRHQIFDSLKYRYKVHFLNKNSAPQADVILTTVATPMMVERYNREKVLHIGAEPSARDFYNIVNIVVEAISTK

SEQ ID NO: 530 - protein, 329 aa, Listeria monocytogenes
MCTSFVLETLDGKHLLSRTMDFAFILEANPTISPRNYGWKSSTDGANYINRYAFVGAGRELDKYIFADGLNEEGLSCASLYLPGEAVYAPAPVEGKINLAPQEFLLWLLGTCATIKDVEAKLSVINLVDQPVPLLGITTPLHWIFTDKSGRCVVIEPTETSLRIKENPVGVMTNTPRIEWHIENLRNYTGLQATQLAPVKFGEYMAKPFSQGTGTSKLPGGYTPPERFVRAAYLKENIIKAKNEEEAITNVWYVLNSVRIPNGAVIKESGDPDFTQYVASMCSESKTYYFTSYENNQINSVTLSKEVIENMKEPTTYQVDKVQNVNKLV

SEQ ID NO: 531 - protein, 462 aa, Listeria monocytogenes
MFKTNVEQNNVPVFGSFESGQDLPEKRMNKESVDPRIAYQLVKDQLIDEGSARQNLATFCQTYMEPEAEQIMAETMEKNAIDKSEYPQTAKLESSCVNMLADLWNVDESEHYMGTSTVGSSEACMLGGMAMKFRWRSAALKNGLDIHAKKPSLVISSGYQVCWEKFCVYWDIELREVPMSEEHLSINTDIIMDYVDEYTIGIVGILGITYTGKFDDIMTLNDLVEDYNNTHDNEVVIHVDGASGAMFTPFVEPGLEWDFRLPNVVSINTSGHKYGLVYPGVGWILWRDKEYLPEELVFDVSYLGGHMPTMAINFSRSASQIIGQYYNFLRFGYEGYRQIHMRTRDGALQLSQAVAETGLFEIYNDGANLPIVCYKLKDDANVAWTLYDLADRLQMKGWQVPAYPLPKEMGNTIIQRYVCRGDLGQNMVTAFKNDLSESIEELNNAHILYHDVNTSKTHGFTH

SEQ ID NO: 532 - protein, 483 aa, Listeria monocytogenes
MKQQTSAKTLSLFGFFAITASLFITVYEYPTFATSGFSLVFFLLLCGFLWFLPVSLCSAELATVDGYQEGGIFGWVSKTLGEKYGFAAIFFQWFQITVGFVTMIYFIIGALSYVISFPALDSNPIYKFIAVLIIFWGLTLLQLKGTKVTAIFAKLGFVLGITIPVLALFFLTIFHLKSGHHAAISITASSFIPKWTNMSSLVIFMLAYMGVEASAPHINEMKNPKRDYPLAMILLIFVGITLNTIGGLSVASVVPSHDLSLSSGVVQTFKALILQNGNSMEWIVKLIASMIAFGVMAQVSSWIVGPTKGMQTVADKGIIPSVFRKTNKHNVPVPLIMVQGVIVSIWAAVLTFGGGGNNVSFLTAISLTVVIYLIGYVLFFLAYFVLVLKKKNLERTYQIPGGKIVKLIVAGVGLLMSVAAIVSAFFPPTSLSKSSDMSYEIILAASFIVTILIPFFIYGIHLKKKNKVTKEKTIQEKVALSMK

SEQ ID NO: 533 - protein, 241 aa, Listeria monocytogenes
MKDKTKKRKWNWAQILAIFVLVTLVVSMVYATVNLITAPSGNVPEGQQTKGDYSLMLMQCVLGVVVLFLPSIISKKMKFVIPNAMYIVFIVFLYCAIYLGEVRSFYYLIPNWDTILHTFSGAMLGGLGFSIVSLLNNDERITLSMSPVFVALFACSFAVFLGVFWEFYEFAADSFGMNMQKTMLEDGTMLQGHAAVADTMGDLFVDFLGAFVISIIGYFSIRKNKKWMKNFEFKKVDEEVK

SEQ ID NO: 534 - protein, 221 aa, Listeria monocytogenes
MARTRQISESIGLGLLLALAGGFMDAYSYIERGQVFANAQTGNILLFGINISEGNWAIAIQYFWPVVSFTVGIALSEVIHRRDIRRLHWRQLSVLIEAVILIGVAFIPLDHNLIANSLISFVCGIQVESFRKMHGRGVATTMCIGNLRSATQNLCDYFEYKEKQYLHNSFLYFSVILSFIIGAVVGNFFIQLFAQYAILVCAFLQLIAFMMMFIDRESKII

SEQ ID NO: 535 - protein, 251 aa, Listeria monocytogenes
MTTIFPKEQNVTPLFEQILANPTACRRFKDVFLDNLESYQETRGFEKDDTLFAKIILSAYRQSDVSALLLGVCGRTLFELLRQAFLIPKKLTVDNPFFLTDKEGNFIAKKDDISNREQEKFQEIYQSDLHHSETTIFLVDDDDIVHSYEPDFSISTKRINKKRGILVLYSLPDTLKSGMTESEVYAFIWKTFLHIQEIIPSSRIFYGQETSENADELGVFLPIHHFEKKMLQNIEQVNELVDALREQMVNK

SEQ ID NO: 536 - protein, 94 aa, Listeria monocytogenes
MANANALGMIETKGLVGAVEAADAMVKAANVTLMGKEQVGGGLVTVMVRGDVGAVKAATDAGAAAAERVGELLSVHVIPRPHSEVDAILPKSAE

SEQ ID NO: 537 - protein, 719 aa, Listeria monocytogenes
MKRYLTLVMLFILSVLLISEWIYPFAELTELSTATWIILFITLSLGSFFLRLKYYWTIPLHVVMIIIVSGIYYAKGGILAGNWLGSFFQITFNGFRDMVQFRSSDISMDFILIVFLIALWLLSYITTYSILRKQRIMSVLVLTVAYLAVINTFTDYNSNWAIVRTVLEGFLLLHLALASRIATPNRISADSLKRNGLFYHGFVILLLAVFVFSSLMLPKKAPIFPDPIPTIKNALGINTTRTVGYSEDDTTLGGALKKDNATVFTAQAEKGHYWRVESKTVYTGTGWANANSGDVISFSSGDNFPIQLTEQTTGATNTAEISFASSSDYMPYPYGTQAVNGAVDSFSANLTIERVGPVDTIKNYTVQLKTPVYNIEKMQNADFSTLSNAFVSQYTQTPKDLPDRVTKLANKVTKDADSIYDKTKAIESYLSTSGTFTYSTDDAKETPMGADYVDQFLFETQIGYCDNFSTSMVVMLRSLGIPARWAKGYTPGEGEKKENDAKTTYTITNNNAHSWPEVFFPGTGWVPFEPTATFSNPENFQEPTTETANKPETPNDSTSTPETPNTPDKTPEQDNGSSSTGETPKKEEPKTETATSNVEIPSWVWWIPAGLVVALLALAIVFRRRIRGYLLLRSLRNSPEFGKTYHRLMKLLASYGYVRESSETLRHFSARVDADLTTSEFSRLTKMYETQLYSKNLTEKVIAAKETQLVQQIIARLTK

SEQ ID NO: 538 - protein, 382 aa, Listeria monocytogenes
MLKKRLLLASRWIIMLIIYAGLWTYTLFQGDTASWFLTYFFSFILLLLFLSSIYPLKAWKVNRSFVKNTYHDGDLIDMQVSFTRKSRYPVGYLLFQQKIPATFGKVRARQQVVYPLFKKQFTVTLAGFVGVRGIHSFPPVDVETSDAFGLLERSRQLSSEKSLTIYPTYFPNVLEKISEASPENERNAAYWTLKKNSNLHSLREFSSGDRISLIDWKSSAKSDQLMTREFENSATSRLSVIFYGASHPNFELSLRAAYSFIRKISEENGEIRVTLLGDQTSKFAPAKGTSRLQDISTAFAEIAPVDSLTLQESLDSNLHSGEKILLFTPCMDTMLMQKVTRLTDNKQLQIITFQSEHSKAMDAPAIFLEQASLLSRWERETK

SEQ ID NO: 539 - protein, 315 aa, Listeria monocytogenes
MSIEPSIKINEIINEVEKVIVGKRHVVKLSLTALLAGGHVLLEDVPGVGKTMMVRTLSKTIGVSFKRIQFTPDLLPADVTGVSIFNPETRDFEFRPGPVMGNIVLADEINRTAPRTQAALLEGMAENSVTVDGITRKLANPFFVMATQNPIEYEGTYALPEAQLDRFLLKINIGYPTVEEEMQLLTLKQYQDPLDQTKQVVTLSELLDLKNKAKQVFIDDVLKNYIIRLVDATRKHPSVALGISPRGSLAFMQAAQAFALIEGRDYVIPDDIQYLAPYIFTHRLILKSEAYYNEETAESIIASILKNTSVPVEKR

SEQ ID NO: 540 - protein, 531 aa, Listeria monocytogenes
LSVKLADLMKLPSLKEAKVVSGKSGLSKLVSSISVLEYTEVALLEDDLFDNDEFYGSEIVVSAFVNIRDDVEAQCRTIERLHKVGEVALILYYVGIFVPKMDQKLIDFANELDFTIIVMPENEMSLRYSEVIYEVVEAIVKQEMTDTNFVTESLEQISSVRPPQRNIDTTLKILSDRTHSSLVLTDNSFQVINSITWPRTRHWDFERVIETSKQIDEHELVQLHLDERDFYTARKPIFQDGMQAMHLFMMKEKGALTADVVMQITEVVQVFMNLWGRNYVEISTAELMKAILNDESVKMRRLGKILNVDVSSIKWMWLVKTEEIRNNEQVLAELKSFVASHFQVSLIDLFEDNIVVLLDNSVGQRDRTHTANEFAMMMKEHGIDLKITVCQGMEQTSDVQSAYSLVNEYKNAANAIYANKSIYSLQEIDFAAKCVEIVDRGELAIAEQMRPLKSLEDNDELIETLSVFLLEGESNYNQAAELLFLHKNTIKYRIQRINELLQYPATKIPESYNLYLAVAIRRLLGGNNNNK

SEQ ID NO: 541 - protein, 427 aa, Listeria monocytogenes
MTEKKTVEQAQSWQSLAFVWTGAMICVPSLLVGGTLISGMPLWEAILIALLGYGVIVVFMIYQGMQSSDLGIPAVSVASQVFGEQGSKKIISILLAIACLGWFGIQANVCGAAFSQFLGIYGINLPVPVSSLIWGVIMLLSAIYGIRILSILNYIAVPILLFVCIYGLVVSLNNGGLAVVENYKPAGSMSFMTGLAITIGSFALGAVIAGDYSQYTKSRKDVVKAAIVGILPSGVLMIAVGAILALTAGTADISVVFTNLGLPVLGIIGLILAAWTTNAVNAFSGGIAIINVFNISEKYHKVAVAIAGGLGTVLAVIGILNHFVPIMSVLSAMVPPVAGVMIASYWIVQKGDKSKWAPVPGVNWLGVTSWLVGAVIAGIPVILTFFPALPQLPNQPLIGIILSLAVYLVGAKVLSGKTNNVENLEGK

SEQ ID NO: 542 - protein, 366 aa, Listeria monocytogenes
MRYLDEQAIENIAIGAAFLGTGGGGDPYIGKMMALTAIKKHGPIKLLSPEEIADDDYFIPAAMMGAPSVLIEKFPKGDEFVRVFEKLGRYVGKEVKGTFPMEAGGVNSMIPIVVAAQLGLPMVDCDGMGRAFPELQMVTFHLDGISATPMAITDEKGNIGIMETIDNKWTERLARVTTVEMGASSLVSLYPCNGAQIKQSSIKNIVTLSEEIGKVIRETSMDEAEKLQKLLDVTHGYHLFEGKITDVVRETRAGFNFGRVKIDGLNKDTNSEVIVHFQNENLVAEKNGEPIAITPDLICMVDLETLMPVTTEALKYGKRVRVMALPADDAWRTDKGIETVGPRYFGYDVDFEPLEELVKKEERRHV

SEQ ID NO: 543 - protein, 516 aa, Listeria monocytogenes
MYKIGIDVGGTNTDAVILDENQQLIHSVKMPTSEDIETGITESLHRVLSETGIDRSKVTHAMLGTTQCTNAIVERKKLAKVGVLRLGYPATASVLPYTAWPEDMVGFLSGKYKLTGGGYEYDGQVLSEINEAEIRETLASWKGEVESVAVVGVFSSLKNDQELAVQKIIEEELGADIPVSISSSVGSVGLIERENATILNAALFKVIAATSDGFEKALEQEGIEHAEIYLCQNDGTLMSLNYARQFPILTIACGPTNSIRGASYLAGLKDAMVLDVGGTTSDIGVLTDGFPRESSLAVDVGGVRTNFRMPDIISIGLGGGSIVREKDGDITIGPDSVGYRISEEALVFGGKTMTTTDIAVRLGMAEIGNPELVAHIPTDFAEKAYKKIADMTEDAIDKMKTSSGSVSLVLVGGGSVIIPDEISGVAQIFRDKNGPVANAIGASISQISGQYEQIYIYSQIEREEALQDAEQKAREQATLAGAVTDSIEVVEVEEIPLAYHPGNATRLRVKVVGNLV

SEQ ID NO: 544 - protein, 512 aa, Listeria monocytogenes
MREYLDSKSQKKVALLEKIFYAENHTSTQEELLNDLNITYPTLISTIKTINFDIERFGYKAFSIVHSAPNLSYTLKISDNCSIQLIINAYIRESPKFQILETLLLASFPNLQALAKKVHVSYSGIKKEIKELNEELRERNLSISTGNQVEITGDEFSLRIFYAFLFLVTYSGDRWPFSFVQYDEITDLLESCPKEIYRANSIDKGMMIHYYVAMHLLRDRMNCQIDTTRQFKVALYKACTEESKKSESAFIKKVAKQLPNRNYKEITYTTQIILSTIVAFGSYSSIEKMPSFFYMDEQLEEMGFMKLVDFASERVNDNLSIPFSEKEMELLRYSFASINYRYFLLDNLINKFNNIVPGYTDLDRNIRKIHKVNHLEPLISQLVNLKEMRLLKPFEEKLASDYLIILDKRIDFSIHTLPIKVTILSTISNETAVFDFMRYFSSYYNLEIINQVDPVVDLYISDFSVSPEVLTSLRINQPIVYVNTRWLESDYVKINDNLAKIARKKFIANKKD

SEQ ID NO: 545 - protein, 689 aa, Listeria monocytogenes
MKKLSMRVILIVTIIFIACGSANVSIAQERDTTNILPEEELDSLYTSNLITEEVAQDKPAEVENLEEAPITEDLVQNPDVLEQPIADSDDSDLTVVNSGDFWTIYRNTVNGEYSLHMFGNVPSSKPTAWNSYLNRIKHIEIEEATLTGNFSSYFRNNVFTVLESVRIERSNLSRVTSFALAFYSSGIEKVIIRDNNYPTAPSLLTTEGMFKNCSNLMEVDLSGLDTSAVTTMWDMFNSCRALEELDVSHFDTSSVTNMSYMFYDNRNLEVLDVSNLDTSSVTNMYAMFEDCTSLEELDVSHFDTSSVTDMYRVFNGCEKLKKLDVSNFDTSSATAMVQMFRNCSALEKLDVSNFNTSLVTDMRAMFAGCTSLEALDVSNFDTSSVTNMAAMFSDNEKVEKLDLSTFDTSSVTNMGTMFKNCTALKSLYLDNFTHAASSTDMFTGTTSLSYLFVSHNVSNFNGLENTNWYDEKNWVQFETLSQLQTYHRKQSEPTGYRKGAFLSLTMDAMGGQFEDAEEQKVQNKFSGEYWEEVIPVKEGHYFDGWYLNQDCTNKFDFSLPADASITIYAKWIENYTVIIPASISLNETSELKVEGINRGDKNLSVGLNRTATSISESNKLTLTNTADTTVQCLAPLSWDGSETNPEKAILTLTPGSEITEGDAVMNISIPENIQAGKYTGNLVFSIKYE

SEQ ID NO: 546 - protein, 157 aa, Listeria monocytogenes
MKKKKVVVISLLLLLVSVIGISSYFLFKDKINLLDVDPSAVEWNGKKQKDTSGEENTIAIPGFEKVTLYANETKQAVNFHNPEINDCYFKISLIHPDGSVLWRSDLIEPGKGMYSIELEKTLAVGEYENAVLKYECFSLNDQSPLNGSEINLKLVVV

SEQ ID NO: 547 - protein, 161 aa, Listeria monocytogenes
MNKLVLSTLSVAAMGMVIFSGGTAYAADKEGNTVVEYSVEGDYTLVVPEKVNLSNDNATEMSVKTINRNLEPGKEVEVTLSSGLSADGEIELERVGATSDVITSSFKSNNSTVTMANPVIGSFSGYAIEETEVSKIQIGSPQGDKKAGAYQTTLTFTAAFK

SEQ ID NO: 548 - protein, 486 aa, Listeria monocytogenes
VALEDKDLRSIQEVRNLIESANKAQKELAAMSQQQIDTIVKAIADAGYGAREKLAKMAHEETGFGIWQDKVIKNVFASKHVYNYIKDMKTIGMLKEDNEKKVMEVAVPLGVVAGLIPSTNPTSTVIYKTLISIKAGNSIVFSPHPNALKAILETVRIISEAAEKAGCPKGAISCMTVPTIQGTDQLMKHKDTAVILATGGSAMVKAAYSSGTPAIGVGPGNGPAFIERSANIPRAVKHILDSKTFDNGTICASEQSVVVERVNKEAVIAEFRKQGAHFLSDAEAVQLGKFILRPNGSMNPAIVGKSVQHIANLAGLTVPADARVLIAEETKVGAKIPYSREKLAPILAFYTAETWQEACELSMDILYHEGAGHTLIIHSEDKEIIREFALKKPVSRLLVNTPGALGGIGATTNLVPALTLGCGAVGGSSSSDNIGPENLFNIRRIATGVLELEDIRKEENQATSELPVDADALIQSLVEKVLAELK

SEQ ID NO: 549 - protein, 284 aa, Listeria monocytogenes
MPIVNMTDMLKKALAGKYAVGQFNINNLEWTQAILKAAEAEKAPVILGVSEGAAKYMGGFKTVVKMTEGLVEDLKITVPVAIHLDHGSSFDSCKAAIDAGFSSVMIDGSHHPIDENIAMTKQVVDYAHAKGVSVEAEIGTVGGDEDGVTGGINYADPQECLRVVKEANIDALAAALGSVHGPYHGEPVLGFDEMKEISELTGAPLVLHGGSGIPEHQIKKAIELGHSKINVNTECQIVWTAAVREKLATDDKVYDPRKVIGPGVDAIIKTVTEKIQEFGSNGKA

SEQ ID NO: 550 - protein, 427 aa, Listeria monocytogenes
MNIGIFTDTYSPQISGVATSIMIMENELRKQGHTVYIFTTTDPNADRESEEGRVFRLPSIPFVFFPERRVAIAGMNKFIKLVGRLDLDIIHTHTEFSLGLLGKRIAKKYHIPSIHTYHTMYVDYLHYIAKGKILTPSMVGKMTKSFCDSYDAIITPTAKVRHHLEEQGIHKLMYTVPTGTDISSFAPVEKQRILDLKKLLGIGENDPVILSLGRIAHEKNIDAIINAMPEVLQTKTTAKLVIVGDGPVRKDLEKLVEEKQLADHVIFTGAVDWENISLYYQLGDLFVSASTTETQGLTYAEAMAASLPVVAKRDESIEGFLSDRETAFLFNEDDELASLLINILSDKNTATLVATNGRVKVESISADQFGINIESTYNEVREIYRVKRQNGTIKVKPTLIKSKIASQVFSLSSSTHVQRKERSSRRD

SEQ ID NO: 551 - protein, 341 aa, Listeria monocytogenes
VIKLTMLSSAEKVKGQGVASAYRELVNLLEERYKNEIDMKINSFEKSDITHYHTVDFRFFLSTFFKKKRGVRVGYVHFLPETMEGSLKLPWIARVVFYKYLIGFYKRMDEIVVVNPSFIPKLTAYNIPEEKIHYIPNFVSKKSFFPISKTEKELAREKYGIPADKFTVIGIGQVQHRKGVLDFIEVAKQLPDVQFVWAGGFSFGKITSGYEELKKIYDNPPNNVNFIGIVDRSEMNTCINMADVFFMPSYNELFPMAILEAMSSDVPILLRNLDLYEEILDGYYVKEVDNPGFIRAIERLENDTNYYNEMLQAAKRGAAYYSEDRLAEIWLGFYQGLLTKE

SEQ ID NO: 552 - protein, 356 aa, Listeria monocytogenes
MSGGAKKNLFNIAIVLAISIGFIIWQFQGVDISTFFASMLKVNPWWLLAAFAAMFIYWFLEAVVLQTASKPANKDQRFFSSFRITMIGQFFNTITPMATGGQPAQLVMLTKQGMDAGRGSSVLLVKFIIYQAMVVLNFLVILIFGIHYLMTGVTQLKFLVLLGFGVHVIVIAALILVGRSQKFTTKLVHILLIPTRLFMKKEKVSNLRNTLDEKIITFHEESSRIGKDWKLIVRCCFYTTLQLWIYFSIPFFILQAIGVTGIGLYMAITYHAFIIMFATVMPTPGGAGGAEYTFTLLFGMLLGPAKLLMALVLWRIITYYSCIVFGAGALLIKDTASQKIKPRIEALAKTPAKNLP

SEQ ID NO: 553 - protein, 423 aa, Listeria monocytogenes
VTDRLIIQGGKKLSGTLQVDGAKNSAVALIPAAILAESEVVLEGLPDISDVYTLYDILEELGGSVRYDNKTAIIDPTDMLSMPLPSGNVKKLRASYYLMGAMLGRFKKAVIGLPGGCYLGPRPIDQHIKGFEALGAKVTNEQGAIYLRADELKGARIYLDVVSVGATINIMLAAVRAKGKTVIENAAKEPEIIDVATLLTNMGAIIKGAGTDTIRITGVDHLHGCHHTIIPDRIEAGTFMVLAAASGKGIRIENVIPTHLEGIIAKLTEMGVPMDIEEDSIFIGEVENIKKVDIKTYAYPGFPTDLQQPLTALLTRAEGSSVITDTIYPSRFKHIAELERMGGKFKLEGRSAVISGPAKLQGSKVTATDLRAGAALVIAGLLAEGRTEIHGVEHIERGYSKIIEKLSAIGADITRSSTAETNI

SEQ ID NO: 554 - protein, 423 aa, Listeria monocytogenes
MAKLSIAYLESLTIKDIYSLAKEHKIAYYSKLTKRELIFALLKSNAEKEGFFFMEGVLEIIPNEGFGFLRPINYSSSSEDIYISASQIRRFELRTGDRVSGKVRPPKENERYFGLLHVEAVNGENPEVAKERVHFPGLTPLYPDRQIHLETEKYPISTRTIDLIAPIGFGQRGLIVAPPKAGKTVLLKEIANAITTNHPDTELIVLLIDERPEEVTDIERSVKADVVSSTFDEVPENHIKVAELVLERAMRLVEQKRDVVILMDSITRLARAYNLVIPPSGRTLSGGIDPAAFHRPKRFFGAARNIEEGGSLTILATALVDTGSRMDDVIYEEFKGTGNMELHLDRQLAERRVFPAIDMRRSGTRKEELLLSKERLEQLWKIRKAMPKQGDGLDISERFVRYLKKTDNNEAFYELLQEEMFKK

SEQ ID NO: 555 - protein, 315 aa, Listeria monocytogenes
MKLITISVPAYNEQESITTLYETIVNVMDSIKDKYTFELLFINDGSKDKTLEIVKQLHKEDNRVGFVDLSRNYGKEIAMAAGFDYAKGDAVITMDADLQHPPELIKEMIELWELGYEDVYARRNKRHGESWLKKATSKWYYKTLQKVTKTPVLPDTGDFRLLDRRCVDALKKLRETQRYTKGLYNWIGFKKVEVTFDAAPRHAGETKWNYRSLINLALEGITSYTTLPLRLSTIAGFAISLGTFIYLIYIVIKTLIVGSDVSGFPTLMITILFLGGIQLISIGIIGEYLGRIFNEVKKRPLYFVEEYNGEKEDIV

SEQ ID NO: 556 - protein, 145 aa, Listeria monocytogenes
MNKIRKWLDKIPWYTDEIHSILMYLIMGGFTTLINIVTFWLCTYVLNWDYRIANTIAWVASVLFAYFSNKKYVFESYTPTWKERAREVTSFFGFRFLTYLVDILVMILLIEVLSINELWAKIWTNVIVLVLNYVFSKWIIFKVKK

SEQ ID NO: 557 - protein, 173 aa, Listeria monocytogenes
MPNEALGLIEVTGFLGAVVAADTCLKAANVELIQCEVISGGLTTVELTGDVGAVNAAIEAGKAATEDLGCLVSSHVIARMSEDTKALFVPQEEAKPQPKEIKQEEPKEVIQKVVEVNTNTKSTEKKLRAMKVIDLRKLAYTLDNVPIPKSKIKYANKDKLVHALKDIYGRSEN

SEQ ID NO: 558 - protein, 428 aa, Listeria monocytogenes
VEAKLQVGVLGFGTVGSGVIHILEEHQEKISQVTGYNISVKKVLVRDLEKNRRYETKGFELTTNPSDVLDDPEIAVVVEVMGSITTAREYILQALKAGKHVVTANKDLIALHGDELVAVAQANNCDLFYEASVAGGIPILRTIVNSLAADKIQKVMGIVNGTTNFMLTKMTTEKKSYEDVLAEAQALGFAESDPTNDVDGIDAARKMVIMTRLAFGMNVNLDNVETNGIRGISPEDIEVAYQLGYKIKLVGTAEETNGTVNVNVGPVLLPKAHPLAGVNYENNAVFVTGAAVGETMFYGPGAGELPTATSVVSDLITVAKNSRLGTNGNAFNSYKHETKHTPKEQVFSKYYLRLTMDDKTGTFLKLTQIFAEAGVGFDKILQQPYDDFTATVVIVTHSTSQAQLEQAIARVKDEPEMQMLAKYSVVEG

SEQ ID NO: 559 - protein, 351 aa, Listeria monocytogenes
MYKGLLEKYKEYLPVTDKTPMISLAEGNTPLIPLPNLSKELGVTLYGKYEGLNPTGSFKDRGMVMAVAKAKEEGAEAVICASTGNTSAAAAAYATRAGLKAYIVIPEGKVALGKLAQAVMYGADIISIQGNFDEALKSVRELAETEAVTLVNSVNPYRLEGQKTAAFEICEQLGSAPDVLAIPVGNAGNISAYWKGFKEWNEAKASGLPRMHGFEAEGAAAIVQGKPIDNPETIATAIRIGNPASWGLAEAARDESGGYIHSVTDDEIVNAYKKIAAQDGVFIEPGSAASLAGVIQHVANGTIKKGETVVCVFTGNGLKDPDTAMSVHEIPISHVDDIEAMRTHLRSGVKA

SEQ ID NO: 560 - protein, 288 aa, Listeria monocytogenes
MRIRVPATTANLGPGFDSCGLALTLYLTLDIGAEADSWYIEHNIGGGIPHDETNVIIETALNLAPNLTPHHLVMTCDIPPARGLGSSSAAVVAGIELANTLAELNLSKEEKVRIAAEIEGHPDNVAPAVLGNWVVGAKLDGEDFYVRHLFPDCALIAFIPKAELLTSESRGVLPDTLPFKEAVQASSIANVMIAAILRNDMTLAGEMMERDLWHEKYRSQLVPHLAQIRDVAKNQGAYAACLSGAGPTVLVFAPRNLANKLQTSLQTLEIDADVLLLDVEGSGAEVFR

SEQ ID NO: 561 - protein, 191 aa, Listeria monocytogenes
MAQLFFRYGSMNSGKTIEILKVAHNYEEQNKTVAIFTSGIDDRDQVGFISSRIGLKREATPIFSDTNIFEIVVNIKPKPNCVLLDESQFLEKEHVFQLAKIVDELNIPVIAYGLKNDFRNELFEGSKYLLLYADKLEEMKTICWFCAKKATMVLRVDDKGKPVYTGEQIMIGGNDHYYPVCRKCHANPPIK

SEQ ID NO: 562 - protein, 358 aa, Listeria monocytogenes
MYDRLQAVEDRYDELNELLSDPDVVSDPKRLRDLSKEQSGITATVETYREYKNVNEQINETKELLGEKLDDEMREMAKEEFAELQKEKTDLEERLKLLLVPKDPNDDKNVILEIRGAAGGDEAALFAGDLFRMYSKYAESRGWKVEIMDANPTGIGGYKEIIAMMNGNDAFSRMKYENGAHRVQRVPETESGGRIHTSTATVAILPEAEEVEIELHDKDIRTDTFASTGAGGQSVNTTMSAVRLTHIPTGIVVSMQDERSQLKNKDKAMKVLRARVYDKFEREAREEYDANRKSAVGTGDRSERIRTYNYPQNRVTDHRIGLTIQKLDQIMEGKLDEIIDALILEDQTSKLEHLNDAN

SEQ ID NO: 563 - protein, 217 aa, Listeria monocytogenes
MKNDKLPASVLSVKVVSNVDNGLFKQLDLKPHQRSLGIITSDCDDVTYTALDEATKAAEVDVVYAKSMYAGAGNASTKFAGEVIGIIAGPSPAEVKSGLAVAVDFIENGASFVSANEDDSVPYFAHCVSRTGTFLSKEANVAEGEAIAYLIAPPLEAMYALDAALKAADVTIGAFYGPPSETNFGGALLTGSQSACKAACDAFKMAVENVAENPLQY

SEQ ID NO: 564 - protein, 283 aa, Listeria monocytogenes
MTQISQLLKKAEAILFEKGLDQNAAEILLETRMGLSRSELWMEISRELEPNHEKQFEEDFARYLAGEPVQYILKTAPFYGYDFLVTEDVLIPRPETEELVACAEAFLKKHPVKNVLDVCTGSGIIAIALKKAFPEISVTASDISAPALVVARKNALLLNADVRFVETDLLEAFKQNEERFDMIVANPPYISEAEKAEMSDYVLKNEPSLALFAENDGLAIYERFVDNLKYVLNSSFWVGVEIGYTQGERVKQLFEKSYPHTTVVIHKDINSKDRYVTCSNILV

SEQ ID NO: 565 - protein, 345 aa, Listeria monocytogenes
MQTIHWNINKQQSNQAIFQEAAKLLQGGECVAFPTETVYGLGADATNQAAVQKIYEAKGRPSDNPLIVHIARREQMDQFVASYPAKAIQLMEKFWPGPLTVILPLKKDSLATNVSAGLSTVGVRMPEHPVSLALIGTANIPIAAPSANRSGKPSPTTASHVIEDLDGKIAGIIDGGATGVGLESTVIDCSLEIPIILRPGGVTKEQIEQIIGPVDISTNNTKETEKPKAPGMKYTHYAPKAPVYLIEGSTQFWQSEINKAEAANKKLGILATKELINQLNTSGTIETTGSIKALDEIATSLYKGLRAFDHADVDIIFAEVYPETELGAAIMNRLEKAAGNRRITE

SEQ ID NO: 566 - protein, 135 aa, Listeria monocytogenes
MNVLFVCTGNTCRSPLAEKILQNLRPDLDVRSAGTRALNGDAISENSRQILAQMNLPTTHQAKKITEADIDWADQIYVMTQNHQAELKSLFPKENDKIQLISEEKTDIPDPYGGSIEQYEITYYELKSAISERFL

SEQ ID NO: 567 - protein, 413 aa, Listeria monocytogenes
MVYLQKQDKEVFDAIKLELGRQRANIELIASENFVSEQVMEAMGSVLTNKYAEGYPGKRYYGGCEFVDIVEDLARDRAKKLFGAEYANVQPHSGAQANMAVYHTVLEPGDTVLGMNLSHGGHLTHGSPVNFSGVLYNFVEYGVREDTKEIDYDIVREAALKHKPKMIVAGASAYPRKIDFAKFREIADEVGAYLMVDMAHIAGLVAAGLHQNPVPYADFTTTTTHKTLRGPRGGMILAKAEWEQKLNKSIFPGIQGGPLMHVIAAKAVAFGEALQPEFTTYCEQIIRNSKKLAETLQANDVAVLTGGSDNHLLLIDLKPLGLTGKAAEKVLDEVGITVNKNTIPFETESPFVTSGIRVGVAAVTTRGFDEVAIEKVGVLISEVLHNLENEEVLADVKARVATLTNEYPLYPSL

SEQ ID NO: 568 - protein, 209 aa, Listeria monocytogenes
MANVHVINHPLVQHKLTIIRDKNTGTKAFRELVDEVATLMAYEITRDMELEDIQVETPLQTTTAKTLTGKKLGIVPILRAGLGMQDGILKLIPAAKVGHVGLYRDHDTLEPVEYFVKLPSDVEERLFIVVDPMLATGGSAIMAIDCLKKRGARNMKFMCLVAAPEGVKALQDAHPDVEIYVAGLDEKLDENGYIRPGLGDAGDRLFGTK

SEQ ID NO: 569 - protein, 379 aa, Listeria monocytogenes
LAKIKVMSIFGTRPEAIKMAPLVLALEKEPETFESTVVITAQHREMLDQVLEIFDIKPDIDLDIMKKGQTLAEITSRVMNGINEVIAAENPDIVLVHGDTTTSFAAGLATFYQQKMLGHVEAGLRTWNKYSPFPEEMNRQLTGVMADIHFSPTKQAKENLLAEGKDPATIFVTGNTAIDALKTTVQKDYHHPILENLGDNRLILMTAHRRENLGEPMQGMFEAVREIVESREDTELVYPMHLNPAVREKAMAILGGHERIHLIEPLDAIDFHNFLRKSYLVFTDSGGVQEEAPGMGVPVLVLRDTTERPEGIEAGTLKLIGTNKENLIKEALDLLDNKESHDKMAQAANPYGDGFAANRILAAIKSHFEETDRPEDFIV

SEQ ID NO: 570 - protein, 132 aa, Listeria monocytogenes
MLESLIGMYHRHQKYMVLFIAICLCGWFLTPHIHIFLGLKLGLIVGWFNYWILMRRTQAMTRALAENRSFYGMGMTLRMGSVLLATIIATQLPEFFHVYSMVIGLGLAYAIIFLDFFAYSMYHRKKFLKREG

SEQ ID NO: 571 - protein, 238 aa, Listeria monocytogenes
LEEEFPTISLLGIDFNLSNILMITVTCVIVLLIAIICTRNLQRRPTGKQNFIEWVMDFVRGIINSNMDWKTGGRFHVLGITILMFVFVANMLGLPLQIAVNDEVWWRSPTADPIVTLTLAIMVLGLTHYYGIKMRGFKHYFVGTYLSPMKFLFPLKLVEEFANTLTLGLRLYGNIFAGEVLLTIIATQLAHINIFVGVLAIIPAIIWQAFSLFIGAIQAYIFTMLTMVYMSHKVSDEH

SEQ ID NO: 572 - protein, 170 aa, Listeria monocytogenes
VLQPHLVIGSAFTFGDAFFTLFAFAILLVLIRIYAWKPLMGIMKEREEHIGSEIDAAEENRAQSEKLLAEQKSVLQQARVESQTMIENAKQLGEKEREEIVKTARRESERIKEEAKSDIAREKEDAISALREQVGSLSVLIASKVIEKNLDEKEQSNLIQDYIERLGDDK

SEQ ID NO: 573 - protein, 179 aa, Listeria monocytogenes
MSKDLEVAGRYANALFQVAQDKDLVDVFSEELTELKAALKANKDFVKLLENPTFTTEQKKNLASAVFEKINPTLRDFIYLLIDRSREDYLSVIADVYQKRVNDLRGVADADVYSVVPLSEQELTALSRVFATKMNKTKLNIQNHIDKSLLGGVKVVIGTRIYDDSLKTKLKDMERQIKA

SEQ ID NO: 574 - protein, 504 aa, Listeria monocytogenes
MSIKAEEISSIIKQQIENYHSELKVSDVGTVTYIGDGIARAHGLDNAMAGELLEFSNGVMGMAQNLETNDVGIIILGPYTEIREGDEVRRTGKIMEVPVGEALIGRVVNSLGQPVDGLGPIETTGTRPIEAVAPGVMQRQSVNEPLQTGIKAIDALVPIGRGQRELIIGDRQTGKTSVAIDTILNQADQDMICIYVAIGQKESTVRNAVETLRHHGALDYTIVVTAAASQPAPLLYLAPYAGVAMAEEFMYNGKHVLVVYDDLSKQAAAYRELSLLLRRPPGREAYPGDVFYLHSRLLERAAKLNDSLGGGSITALPFVETQAGDISAYIPTNVISITDGQIFLQSDLFFSGVRPAINAGLSVSRVGGSAQIKAMKTVAGTLRLDLAAYRELESFSQFGSDLDAATRAKLERGKRTVEVLKQDLHKPLKVEKQVLILYALVHKYLDDVPVHDVLRFESEMNTWFDHNHPELLEEIRTTKKLPDEAKLEAALKEFKNTFVPSEEK

SEQ ID NO: 575 - protein, 290 aa, Listeria monocytogenes
LASLIDIKQRITSTRKTSQITKAMQMVSAAKLGRAESNARSYEPYVSKIKDVVTHVASTGNSSDHPMLVSRPVHRTGYIVLTSDTGLAGSYNSSVIKEVFQEINKKHTSSDEYAIITVGRSARDFFKARQMNVVLEVQGITDHPIFAEIKDIASNTVQMFEDGVYDEVFIYYNHHINSISSELRKEQLLPLTEFHEKGKETDVDLTTYEFEPSEQEILEVLLPQYVESLIFGALLDAKAAEHAARMTAMRSATDNASDLISDLSLQYNRARQAAITQEITEIVGGAAALE

SEQ ID NO: 576 - protein, 293 aa, Listeria monocytogenes
MNEQELKQMIEGILTEMSGGKTTDTVAAVPTKSVVETVVTEGSIPDITEVDIKKQLLVPEPADREGYLKMKQMTPARLGLWRAGPRYKTETILRFRADHAVAQDSVFSYVSEDLVKEMNFIPVNTKCQDKDEYLTRPDLGREFDDEMVEVIRANTTKNAKLQIVVGDGLSSAAIEANIKDILPSIKQGLKMYNLDFDNIIFVKHCRVPSMDKIGEITGADVVCLLVGERPGLVTAESMSAYIAYKPTVGMPEARRTVISNIHSGGTPPVEAGAYIAELIHNMLEKKCSGIDLK

SEQ ID NO: 577 - protein, 473 aa, Listeria monocytogenes
MSKGQVIQVMGPVVDVKFEGGNLPEIYNALVIEYKSDAEEAPTSQLTLEVAIQLGDDVVRTIAMASTDGVQRGMEVIDTGSPITVPVGTVTLGRVFNVLGNTIDLDEPLPSDIKRNKIHREAPTFDQLATTTEILETGIKVVDLLAPYLKGGKIGLFGGAGVGKTVLIQELIHNIAQEHGGISVFAGVGERTREGNDLYFEMKDSGVIEKTAMVFGQMNEPPGARMRVALTGLTIAEYFRDEEHQDVLLFIDNIFRFTQAGSEVSALLGRMPSAVGYQPTLATEMGQLQERITSTNVGSVTSIQAIYVPADDYTDPAPATTFAHLDATTNLERKLTEQGIYPAVDPLASTSRALSPDIVGEEHYAVATEVQRLLQRYKELQDIIAILGMDELSDEDKQSVSRARRVQFFLSQNFHVAEQFTGQKGSYVPVKETVKGFKDLLAGKYDHIPEDAFRSVGRIEDVLEKAKDMGVEV

SEQ ID NO: 578 - protein, 134 aa, Listeria monocytogenes
MGSLNVSIVTPDGPVYEGVAQMVIARTKAGELGILPGHVPLVAPLKIDIVRLKVESGEEWVAVNGGFMEVNGEEVNILADTAEREQDIDIDRAEKAKQRAEEELSRAKEQKVDEVMAQLALQRAINRIHAKEHN

SEQ ID NO: 579 - protein, 78 aa, Listeria monocytogenes
MYNIIMESPYVIIISHLLFIVITFWALQAINYEKFIKKNHVTQARLLFVIISIVLGYTLSNFFLDYLTASKQLINFFS

SEQ ID NO: 580 - protein, 430 aa, Listeria monocytogenes
LEKIIVRGGKQLNGSVKMEGAKNAVLPVIAATLLASKGTSVLKNVPNLSDVFTINEVLKYLNADVSFVNDEVTVDATGEITSDAPFEYVRKMRASIVVMGPLLARTGSARVALPGGCAIGSRPVDLHLKGFEAMGAVVKIENGYIEATAEKLVGAKVYLDFPSVGATQNIMMAATLAEGTTVIENVAREPEIVDLANFLNQMGARVIGAGTEVIRIEGVKELTATEHSIIPDRIEAGTFMIAAAITGGNVLIEDAVPEHISSLIAKLEEMGVQIIEEENGIRVIGPDKLKAVDVKTMPHPGFPTDMQSQMMVIQMLSEGTSIMTETVFENRFMHVEEMRRMNADMKIEGHSVIISGPAKLQGAEVAATDLRAAAALILAGLVADGYTQVTELKYLDRGYNNFHGKLQALGADVERVDDSKVDVTNLASLF

SEQ ID NO: 581 - protein, 331 aa, Listeria monocytogenes
MAKDVGIDLGTANVLIHVKGRGIVVNEPAVVAINNKTGQVLAVGTEARDMVGRTPGDITAIKPMKDGVIADFDIVQEMLRFFIQKLNLKTFFSRPRILICCPTNITSVEQKAIREVAEKSGGKQVFLEEEPKVAAIGAGMEIFEPSGNMIIDIGGGTADVAVLSMGDIVTSQSVKVAGNKWDADILNYVKRKYNLLIGERTAENIKVTIGTACQGAKEEKMEIRGRDLVSGLPKTISITSSEVEEAIHDSLHLMVLAAKQVLEQTPPELSADIIDRGIIMTGGGSLLHGLDELMSEQLKVPVLITENPLDVVALGTGILLDSLTNKKRNRF

SEQ ID NO: 582 - protein, 242 aa, Listeria monocytogenes
MTEEFVNKEDALKNYNVKEFRTPDGYTSDMILTTVKEVNGKPTLHILLIKRSSTNAEGRPNIEGGKWAVPGGFVDENESADQAAERELEEETSLTGIPLIPFGVFDKPGRDPRGWIISRAFYAIVPPEALEKRAAGDDAADIGLFSMTEALELPLAFDHLDMLKKAYSAITEEFLLTTAICDFLPETFSAELLYQTLDGCTKPGILPDEVEFMENIEYLPYLEKVGELYRFNADAEAGSIYF

SEQ ID NO: 583 - protein, 297 aa, Listeria monocytogenes
MNLRQLYYFKKLAEKEHYTIAAAELSITQPSLSHSIAELERELGVYLFEKQGRNIRLTKYGRFYLTYVKKSLAELEKGEKLLHELTSPSHGNIDLGFIYTMGAHTVPELVQNFTKVESHKDITFSFFQGATKSIIPDLKNEKFDLAICSYVENEPDIEFLPLTKQELVVVVAENHPLAKYDSIDLQDTADYSYIFFSDTSGLRPLIDSLFAEINIQPKIGCYVEEDTAMVGLVSVDYGISIMPKISSLAHYNVKVLSINEPKHDRFIYLASLKNHYISPASKAFKDFALRYGKKHFL

SEQ ID NO: 584 - protein, 664 aa, Listeria monocytogenes
MTDYPSIFEPLTVKRMTIKNRVIMPPMGTNLAGLNGEFLEEHMNYYEQRAKGGTGLITIENACVDFPYGTNGTTQLRIDNDQYIPGFYKLTERLHKHGTCVSIQINHAGASAYPARLNGLQPVSASDIPSKKGGTVPRPLTVEEIYEIVNKYGDAARRAQQAGFDAVEIHGGHSYLLCQFLSPLYNKRTDEFGGTPENRARIVKLILEKVRAEVGPFFPIVLRFSADEFTEGGNHLEDILELLDYCQEEADILNVSAAINDNLYLQIDQMNLEDGWRSYLAKAVKDKFNKPTITSGNIRSPKAAEKILSEGYADLLAMGRGLIAEPNWVNKVATGQEDMLRKCISCNIGCADHRISKSKPIRCTVNPDIIHEDKYKETKVTRPTNVVVIGGGTAGLEAACTAAEVGCNTTLIEANEQTGGLARAIANLPDKSRIADFPNYLANRAEKLTNLKVITGTKADTALIDTFNPDVVVNATGSKPLLPPIKGLLDVIDKEGSKVHSIFGLISNIDDFTEFSNKKVAVIGGGAVGLDVVEYFSERGSDVTIVEMMPLLGKDLDMITRLSMMDIIEKNHVDVQTETALTEVAADHFKVKHDGVDAEIPFDYGFVCLGMRPERPLMEELAAYGKEKQIEIVNIGDSAATRKILEGVREGRNILTTLEKIGSL

SEQ ID NO: 585 - protein, 454 aa, Listeria monocytogenes
MILKTNLFGHTYQFKSITDVLAKANEEKSGDRLAGVAAESAEERVAAKVVLSKMTLGDLRNNPVVPYETDEVTRIIQDQVNDRIHDSIKNWTVEELREWILDHKTTDADIKRVARGLTSEIIAAVTKLMSNLDLIYGAKKIRVIAHANTTIGLPGTFSARLQPNHPTDDPDGILASLMEGLTYGIGDAVIGLNPVDDSTDSVVRLLNKFEEFRSKWDVPTQTCVLAHVKTQMEAMRRGAPTGLVFQSIAGSEKGNTAFGFDGATIEEARQLALQSGAATGPNVMYFETGQGSELSSDAHFGVDQVTMEARCYGFAKKFDPFLVNTVVGFIGPEYLYDSKQVIRAGLEDHFMGKLTGISMGCDVCYTNHMKADQNDVENLSVLLTAAGCNFIMGIPHGDDVMLNYQTTGYHETATLRELFGLKPIKEFDQWMEKMGFSENGKLTSRAGDASIFLK

SEQ ID NO: 586 - protein, 291 aa, Listeria monocytogenes
MTNKITERITGHTELIGLIATPIRHSLSPTMHNEAFAKLGLDYVYLAFEVGDKELKDVVQGFRAMNLRGWNVSMPNKTNIHKYLDKLSPAAELVGAVNTVVNDDGVLTGHITDGTGYMRALKEAGHDIIGKKMTICGAGGAATAICIQAALDGVKEISIFNRKDDFYANAEKTVEKINSKTDCKAQLFDIEDHEQLRKEIAESVIFTNATGVGMKPFEGETLLPSADMLRPELIVSDVVYKPTKTRLLEIAEEQGCQTLNGLGMMLWQGAKAFEIWTHKEMPVDYIKEILF

SEQ ID NO: 587 - protein, 252 aa, Listeria monocytogenes
MNKVVVKNVTFGEGAPKICVPMVGKTVAALKEEAEMLQTIDLDVVEWRVDFFEDVKDLAKVEAALGEIRAILPETPILFTFRSAKEGGELAVSDEFYFELNETLAGTGKIDLVDVELFNEEADVLRLIETAHKNNVKVVMSNHDFDKTPAKEEIVSRLTRMEALGADLPKIAVMPKSAGDVLTLLDATNTVFEKANQPIITMSMAGTGVISRLAGEVFGSAMTFGAAKKASAPGQIDVNELRHVLDLLHKQF

SEQ ID NO: 588 - protein, 302 aa, Listeria monocytogenes
MKLSNLKYFVDVAMEGSFTRASEKLFISQPTLSRRIKEVETELGVELFIRNRHSLELSSAGQQFLIEVNDILNRVNKLSHMFDNQKTADEAGQLLKIGYLSNFNMNAMYELLESFKQSHPHVQFSLKPDTPMNLAEGLSNGQYDLVFNLSAYFQPNMSIEEVLFIKNHLQIAIPADHRFRKKKKVYFNDLKQEIVILLERKQSPIIVDYVVSQCTKHGFNLKANSYVKDLDEGLAMTSVGEGLAFLYSGMNDGTLEDKYNIKIMDIQEERNDQNIVAAINKQSENTLLQELFSFIKSSLLTK

SEQ ID NO: 589 - protein, 586 aa, Listeria monocytogenes
MTAKITEKMLFSPSFEYVDNGIEHGVLSPFETKEIILEKGQQIAEGFKLLDCSIKMLKDVPVKMRDGITIYTDIYLPITEEKVPTLIAWSPYGKSAGTAPRYKNLFNMLGMGNAWNSGLTKFEAPDPAYWCAHGYAVCNPDMRGIAHSEGNTTMIGSQEAEDGYDLIEWLAKQSWSNGKTALTGTSYLAFSQWYIAAEQPPHLTCINPTEGLADGYRDLAFIGGIPDPNFIERLQINHVSAKNSQREDLTKEMEAYPLADSAIWKDKVADPSKITIPAFVIASYSNTLHTMGTFRSWRSLGSKEKWLRIHDRQEWPYYYDENNVEELRRFFDYYLLGKENNWTDTPTVRYALIDFQGGNQTDLPSEVFPPTNSENKRYYMNGLLRTLQETPTSDDFKVSYTTENLPGRASFQMTFDKETHFVGYPKAKLFMEVDGYDDLDVFVWLQKLDKFGNVLSEFVVPNHGAALQDFTQEGASALRYKGAWGRLRASMRQLDSQVSTDEIPAYSFDKVEKLSSGEIVELDIILSPIGLTYKAGETLRVVLSSKDELGSVMPGTPGCTPNNKGTHILHTSKEHPSYIQLPIINK

SEQ ID NO: 590 - protein, 197 aa, Listeria monocytogenes
MKKLLFLGDSVTDAGRDFENDRELGHGYVKMIAEQLEKEDVTVINRGVSANRVADLHRRIEADAISFQPDVVTIMIGINDTWFSFSRWEDTSVTAFKEVYRVILSRIKEETNAELVLMEPFVLPYPEDRKEWRGDLDPKIGAVRELAAEFGATLIPLDGLMNALAIKHGPTFLAEDGVHPTKAGHEAIASTWLEFTK

SEQ ID NO: 591 - protein, 319 aa, Listeria monocytogenes
LQKEKAPIGLYFLLIAVMASWGFNVTMTKVLVSYFPTVTMTSFRIFTAAITVIIILFITKKLRLPTKQEFGLILLASIFNIVIHHFFLSNGLKLTTGTNAGLILGSAPIVVAIFSVIFLRERIGAWRALGFLAGIFGVSLVVLSNGTGISGISLGDIDIFIAMASQAFSFIIIKKLAGSMDTGLMTGYMLFLGSVMLFGLSRFMEPDGMSELVTVHSWKLWLLFVVSAVVATAFGNFVYNYAVGKIGPSRSAIFMNFNPLFSLIGALLFLGEAIKIPQLVGFGFIIIGVLLGSGALMDLIYERKKTKVRDPEKLLEKEV

SEQ ID NO: 592 - protein, 74 aa, Listeria monocytogenes
MKLLLKNINELAAKQKSEGLTAFEKERQAALRQEYLKKIRGTVQDNLHHVTIIDPLGDDVTPKKLKEIQAELRG

SEQ ID NO: 593 - protein, 502 aa, Listeria monocytogenes
MIKISVIIPIYNAENYIEKAFSSLKNQTLAQNEFEILCIDDKSTDNSLGKLKQLSKIHKNMRIINLHKNSGGPMIPRNKGIKEAKGKYIIFLDNDDYLGEEALERLFIQAEKNQSEVIFGKYVGINGRGVPQSQFKKGNRNEADILADNLVYTLAPHKMFQTAFLKTKKIYFDPNILIGEDQYFVMKAYVNAKVITVLADYDYYYVVSRGDENLSIKESKMDPREICKVVPAVVKEIEASPLHPTYKKTLIRAYIQRYFNDYITGNYNLDYKNMSERQKTFVQVMKDTIVCHLDEKMKNELPTKTRFMIDIIAENNPEKLIDVRMQMENFSKNQVVKVENGYIKGRFRKMRPQLAYDDVYDINHLNSSKVQLHSVTLQNNNYLLDISLEQSLLTRFQTALRLCLKERDGNLEIWISPLKMLSTERGIYAVDSTLFNHTCIWDLFIESEINGFKNRKRVGKDRDFEEIVSSNNTPLLIQNNSYQIKAYFTTPFSNLSFQIISE

SEQ ID NO: 594 - protein, 149 aa, Listeria monocytogenes
MEIAIAADHGGFQLKEKIRAHLIESGYTVKDFGCYSLESVDFPEYAAKVGHFVATENSLGVLCCGTGIGMSMAANKIKGVRAAVVSDAFSAMMTRRHNNSNVLCLGERVLGDSLALLLLDTWLVAEFEGGRHNTRLQKLAELEEREEDK

SEQ ID NO: 595 - protein, 222 aa, Listeria monocytogenes
MKMIAASIMCADSLHLADELRALEQANVKMLHCDVMDGVFVENAAMGAYVLQDIKNNTKMLLDIHLATVNPDKFVDLYAAIKPAYMSFHLEASRDVNATINHIRELGIRPSIAISPDTEIEQIYPFLGKVDMVLMMTVNPGFAGQKFQHHVLEKIKKLQKELESHTNKPLIEVDGNIFEETVRLLEPIGADVYVVGTAALFNEKAGSYTEKLAPLREIIQER

SEQ ID NO: 596 - protein, 216 aa, Listeria monocytogenes
MHLDSANLDDVKKIQASSIFKGITTNPTILVKEKCNRQTAINRILELTDKQVFVQTVGFTYEEILADARMLLTMFGKDKIAIKIPAHEAGTNVIDTLKKEDKTIQILGTAIYSADQAITAALAGADFVAPYVNRMSAANIDPFKEITQMRHFFDKKALKTQIMAASFKHSGQVMQAYESGADTVTIPYEIYSQMTNKVLAVEAIRVFNEDAVLYEK

SEQ ID NO: 597 - protein, 686 aa, Listeria monocytogenes
MYLDNRSKTLFQEVIKNPNITNKQLEVKYKLSRYQISYSFQKVNEWLKWKNYPEVKRSKNGRFILEPELTALFSEKETRDPSVEYLPSENERANLILLMLLTSKEELSLAHFTTKIQVSKNTILRDLKVAQKLLPKETTVTYSRASGYQLAGSEWELRKVLTQVVSSVKEMFRGEHYFLSYSGIEKVQLMEIRRTLEEAEAMMQIKFTYEQIELLPYLLSVMFLRIRDRRLIDTAFHIDEKSLSDTREYHITDILLEKTGPVPEQERLFITLQLLTTNIFSGEILTEKLTEDLEKVVLTCLDLFEKKALVSLKNKHILIEKLLLHLKPAYYRIKYQMNLEDTLYEKFNQEFEALNFIVKEAFDPLAKFIGREIPAGEIFFISLFIGSDMIPQNDIYHKQKRAIVLCPSGVTFSKIMENILVKLFPEIHFYPTISVREYAFFKAEVDIVFSSIPLKDGENVFVVQPFMNDIEKTQLRQHVLQNLFGMGNQLTSIDKIMEVVERNADIKDPNAIRDGIIDILSANIATDENKRVKKVYLHDLITEDNIMICEDVKNYQEAIRLASQPLLLQQAITANYVKTMIDNHKFHDPYIIIGEDIAIPHAMPNAGVNRLAMSLLVVKNGVYFSETEQVHFVIVIAPVDKEQHIEALYQIVHLAENHQILDDLLENVTKEKIMQTINQLVIREDE

SEQ ID NO: 598 - protein, 200 aa, Listeria monocytogenes
LDKQAILNNIHQTWQEEANAISRLPEVTSEEALVKTVEKIAECTGKIVVAGCGTSGVAAKKLVHSFNCIERPAVFLTPSDAVHGTLGVLQKEDILILISKGGNTGELLNLIPACKTKGSTLIGVTENPDSVIAKEADIFFPVSVSKEPDPFNMLATASTMAVIASFDAVIVCLMTYMNYTKEQFSVIHPGGAVGNKLLNK

SEQ ID NO: 599 - protein, 155 aa, Listeria monocytogenes
LDVLEYFKEEMVRFSNEQNKEKLLAEMAEQLCEVGAVKPSYKDAVIKREKVFPTGLLTAHAGVAIPHTDSEHVIRPVVAVRILKKPVSFIEMASDNEAIDVRIVFMMALRSADEQLDMLQTLIQLIQDEEVMTTLLKAQETGDVLSAIEHFSKNN

SEQ ID NO: 600 - protein, 132 aa, Listeria monocytogenes
MGSFFASFVDWLIGSPGRFVVNLIEDNMLIFMVVVMIYATTILYAKWTLAYYLPKKMSQLAEMKTWELDELYAAWQTEKKALPWYILVPSRNEFWVKSARNAPESTKLLHFSQQKLKLSDKEKLQKIIEIQS

SEQ ID NO: 601 - protein, 216 aa, Listeria monocytogenes
VAKIVPSVFGADIGRINEQLQVLEKNDIDLLHVDMMDGSFVPNIAFGPDQIKMMKKGTKLQFDVHMMVYEPDRYIPRLVEAGAHMITVHQEATTHLHRTIQLIKSYGVRAGVVLNPGTPPSTLEYVLDDIDCILLMTVNPGLGGQKFFQSSLEKIRKTKAYIGNRPIQIEVDGGVNDELAKECTLAGADLIVVGSYLFEGDIEANLEKLAKGVLTE

SEQ ID NO: 602 - protein, 348 aa, Listeria monocytogenes
MKALKLYGKRDLRYEEADMPTIEEPDDVILKVKTVGICGSDISRYSKLGPYVPGMVWGHEFSGEVIEVGSEVTDIEIGDRAAGCPALYCGECEYCKKGEFARCRKLTVIGARHPGAYAEYIKLPAENVVKIPNELDYEAAALVEPSAVVVHGFYHTKLQAGDDVVVVGSGNIGLLAIQWAKVFGARRVIAIDVDDKKLALAKEVGADVVINSLKEDPLEVVAAHTDGLNADLVVEAAGSPITSAQVFAYAKKGGGVVFLGIPYADVTIERFYFEKIVRSELTVWGSWNAISAPFPGKEWQTTIHFLANKQINIEPMITHRLSLAEGPEVFERIYERNEFFGKVLFFPE

SEQ ID NO: 603 - protein, 97 aa, Listeria monocytogenes
MKKKRIYVCCGTGIATSTVISKKVRAVLDEKRIPYEISQCTVQEVASKVSTSKPDIIVSSTTVTGDVGDVPVVIGRSFLTGLKKQETIDEILAILQD

SEQ ID NO: 604 - protein, 473 aa, Listeria monocytogenes
LTETILSVGIDLGTSTTQLILSELEIQNMASSFTVPRIVISDKRIIFRSEILFTPILADNLIDVEAIRDFVTKEYANAGIKKEEIGMGAVIITGETARKDNASNVLDAMSGFAGDFVVATAGPDLESIIAGKGAGAHTYAKENNTSVVNLDIGGGTTNLSLFDRGELIDTACLDIGGRLIKVDRETRKITYIAPKIQALIEKRGYPVKLGETTSPENLQPVLGEMVELLKNSVGLGAPNDFYETIITNKGLKFLTEIECISFSGGVADCISTGALSDPFRYGDIGLLLGKAIAESSLMTEKKYIESVETIRATVVGAGSHTAEISGSTITYTEKIFPVKNIPILKLAKQEEDENMAEVIKEKLSWFKIENEMEHIALAIEGENSPSFQQVTEYAKAICEGMKEPISLGHPLIIITWHDMAKALGQSIFGHLPAGHPLICLDSVKVDNGDYIDIGKPVADGKVLPVVVKTLVFN

SEQ ID NO: 605 - protein, 423 aa, Listeria monocytogenes
MDIILDFFKYIIGLGVTVMMPIIITILGVIFRKKISVAFKAGLTVGVGFVGLGVITSLMLTTITPVTKALVENYNFKLTATDIGWGVGSSLAWGTEVVPFVFVAIIATNILMIAFKWTKTMDVDIWNYWQPLFIASALYLTTGSMIIAVLSSIINMAIIFKIADWTQKDVEDVLGLEGISLPQIQTTGWALVGYPMNWLLGKIPGVRKINWSTEKVQSRLGIFGEPMLMGLIIGGGLAAIAQMPLSQVLQTGVTIAASLVLIPRMVSLLMDGLTVISEAAHEFMEKRFPGRELFIGLDSAVGIGHPFVLSLGLLMIPITLILAFILPGNKVLPLADLTALPFYMIFAIVPSKGNLFRGIFTGIVIVIITLYLSGAAAPLMTELAGQIGYNIPKDAVEVTSLAVGTQWYTWIVYYGLHWFGGIL

SEQ ID NO: 606 - protein, 311 aa, Listeria monocytogenes
MAGKMKLFSVTSERPLATKIADYLDIPLCEVELQKFSDGEVKINIEESIRGTNAYVVQSMNSNVNERLMELLIMVDALKRASVHSINIIMPYYGYARQDRKARSREPITAKLMANLIQRAGANRLITVDLHAAQIQGFFNIPIDHLSAIPLIGDYLIENYGEKDVVVVAPDHSGVVRARRIADRLNAPIAILNRKPRPHEDEIMSVIGDVKGKVAIVVDDIIDTGVRATTSADILLEKGAVEVIACATHSVMAGNATERLQNSNIKEVITSDSIDLPEDKQFDKLTTISIGRILGRAIEGVQENRSLHPLF

SEQ ID NO: 607 - protein, 192 aa, Listeria monocytogenes
LKKILVPILLLATILASCSSPNEKITKDTKISKTITIRADYKVPKDIKELEDDSANIVKVKFLQNKTIGKDGSTISEIEILTSYKGNLEKGSKVDISEPWYLSDGKYVAVENYIALDKEQEYTIFLGEKDKDTYPLSSLGYGKFGGSLKEDQAVLADFNILGEVQKFDFISENTEEVKNYQLIKEQVAGKYK

SEQ ID NO: 608 - protein, 226 aa, Listeria monocytogenes
LIIDVLQHVPHEGPGLIANWARENQHQLKIHSLFEENAHVPNDSDFLIVLGGPMGINDTAEFPWLKDERKLIKRLSEQHKPVFGVCLGAQQIAATFGSEITVNKEKEVGWFPVKRTSDKLLFFPKSLNVFHWHQDTFALPTGSTRLFASEGCLNQAFLYGENIIGLQFHFEMEKAGIETILRIDEAFITPGKYVQSVEVMREKDVPEDNKQMLEAILDYLINPKTI

SEQ ID NO: 609 - protein, 119 aa, Listeria monocytogenes
MEQILFIQTGFGVDVHGQNITKAAERAVRNAIFTNSMPGIQGLLPDGDLQNMVVNIKLALPCDADQLDEDTIRAIIPYGTVTIEKMAGGMMTTSGIFLEDKEDKNDLMYIVNASVETGY

SEQ ID NO: 610 - protein, 152 aa, Listeria monocytogenes
MNNEQNMNQQIALFYFGYKAFTETADLIIAKHSLKRLHHRILFFTARMPGLTINELLTFLEISKQALHQPLAELKERELLTIEQGRRDKRQRCIFLTSAGKELENELGAAQRKQMSEIFTNSADTDGMHFTEVMEGYAKNRPGAAFIKDFKE

SEQ ID NO: 611 - protein, 485 aa, Listeria monocytogenes
MTKTIREMCLRYTDLSEHDIDELIHTAQSLSVSAMYQDVDVFIDVYNKLTSEALVIHHTPPKTTKSLYKNKVVGETALRSNEPGVLRTLETGMNSNDLLAKTQENVLIRQKVYPIRNKQRVIAVLILENDISAEIKAHFEIDNEETAYRDVSTTLSAMSKLTDSITDQLDDAILIFDRNGILQQKNCAADQYYERLGYMEDIQGMHYDNLSLDQMMFDAIMYQIETGKQPIQLKKEVVIAGNYFIMKQIFVKEEDEQECRFILILHDITDIKVKEAEIVSKSVAIREIHHRVKNNLQSVVSLLRIQGRRSTSMEAQKILNESVSRILAIAATHELLSKQMEDGINLYMVIETVAYNIERCCTDCPKVAVRMDIDKRIYLDSDRTVALALVMNELLQNSYDHAFHPNESGEILLQIKEEKNIIHAEVTDNGHGFNVRKVSEKSLGLSIVKSYIKDKLRGKVTIESNEHGTKTMFDFKYNSIHATKK

SEQ ID NO: 612 - protein, 143 aa, Listeria monocytogenes
MEKYHRILVAVDGSEPAKLAFEKGLELALKLDGVLGIASIVDLRAFSPNVSYDGSLEEKAELELKTSVNEYAEKARTAGVKQVETFVAKGNPKILLSTDIPAEFQADLIICGATGMNRVEKLVLGSVSSYIMAHAICDTLIAR

SEQ ID NO: 613 - protein, 476 aa, Listeria monocytogenes
LKKLTYVIITGLVLVFIAGAFWITNSTNQSDQKATQTEPIKKISPANVKTISSEAKKTLNSLASSGADKASISDLKQLIKELKSYPTEKNDSGVYLQNLTACLEAVKSYTTGKADEKTLGKVYPAFLASEQKLSAIEKTNQYDWFYAAAATNQQGLKEKGVVTLTMVGDNSFGTYPETPEHLKFDNVFQKNNGNNTYVYKNCLPWFKSDDYTIINAESAFTNATKAENKMWRIKSDPAHVAFLPASGVDAANLANNHTMDYFQVGYDDTLKAFKENNIPVFNADAPLETTIKGMKTVLLGYDCRMSQQSPAYLERIVKDVKKYKKEDTLVIVNMHWGVEYRETPTDYQTQFGHAILDAGADIIMGSHPHRLESVEKYKDKYIVYSMGDFAFGADPTLLSRMTSMFQLRFTKEDNKIVLKDISIVPTYENSDGSTTENNYQPLPVFGDDAKKIVDELNRISKPIEGGVTEYTYFDPF

SEQ ID NO: 614 - protein, 271 aa, Listeria monocytogenes
MKKNIFKLLMALCAVLLIAGCGNSTSADKKETKETKEDGTVTFYVVRHGKTMLNTTDRVQGWSDAVLTPAGEEVVKSAGKGLKDVDFSAAYSSDSGRAIQTANLILKESDKSADKEVQTDPRFREFNFGSYEGDLNENMWTDIAKSQGKTLEEWQKAGLSPKDFANSVAALDKTRVKEGENWPAEDYATIQARLKEGLTDVAKKESKNGDSNVLLVSHGLSIGALLDTIEPGYKLPAEGIKNASVTKITYKDGKFTIGDVNDLSYVEKGSK

SEQ ID NO: 615 - protein, 193 aa, Listeria monocytogenes
VTGMNGRIVIADDEPITRMDIRDILEEANYNVVGEATDGFEAIELCKSHQPDLVIMDIQMPLLDGLKAGKRIISEGLAGGIILLTAFSDPKNTEKAKGFGALGYLVKPLDEKSLIPTVEMSIAKGRETRKLEQQLEKLTKKLEERKVIEKAKGVLMIENNITEEEAYNMIRNLSMDKRCPMMEIAETIVMSDD

SEQ ID NO: 616 - protein, 342 aa, Listeria monocytogenes
MLNEQQITRLLYRLQDPVLEASLEETEGVLEVQVLEETANIKIALADPAVETDHFVHNIEELLTQFGVNEINIELEYLPAAVIDRIFQARDNILSEASETKFLAIASGKGGVGKSTVSANLAIALAQQGKKVGLLDADIYGFSIPVLLGTTESPHKENGQIIPVETHGIQMISMDFFVEQGEPVIWRGPMLGKMIKMFLEEVRWGKLDYLLIDLPPGTGDVALDIHTLIPKCNELIVTTPHYAAASVASRAGYMAAKNNHKIIGVIENMSYLTLADGQVLKVFGQGGGEKVAADLETQLLIQLPIEQPEPNGNGYVSALFNSSSTSGKAYKTLAEKIIPYLS

SEQ ID NO: 617 - protein, 283 aa, Listeria monocytogenes
MKTVKLNNGVEVPILGFGTYQITDAAEAEHAVKDAIKAGYRHIDTAQSYMNEEAVGRGIAASGVDRKELFITTKIWVENVSYKGVMSSFDRSLKRLGLDYVDLLLIHQPFNDVYGAWIAMEELQASGKIRAIGVSNFSPDRVIDLAAFNEVTPQVNQIEVNPFQQQTANLAILRKEGVAIEAWAPFAEGKNDIFNNPVLTKIGAKYGKSAAQVILRWLVEQDIIVLAKSVKPERMAQNLAIFDFELTEADKEEIAGLDQGESQFFSHADPEMVKWMASRKLNV

SEQ ID NO: 618 - protein, 140 aa, Listeria monocytogenes
MNIKQAADMFGLTVDTLRYYERVGVIPPVHRNESGYRDYKTSDLNWVYLVKNLRNAGLSVESLIEFATLAQLRETQNVEAAQKQVLVDQLKELDEKLAEMKQVRDLLVYKIDSYDSHIAQFKAGELNADNVEKLWERDKF

SEQ ID NO: 619 - protein, 119 aa, Listeria monocytogenes
MKKTSIIFIFCTLLFVTACSTSENQTQATEATGTIEQVETDAILINNFKEKKDKYNPEAAIRFDIVDKYYDETGNKIKITDLNKNDDVKIILTKDFPIQETSPAQIDPKYVQKIILLNK

SEQ ID NO: 620 - protein, 379 aa, Listeria monocytogenes
MQKVSFKTDLYIGQGATDRLLDFKDKQIFIVTDPFMVSSGMINAITDKIDQSNTYTIFSEIIPDPPIENVVAGIEVLNECDANLMIAIGGGSAIDAAKAMKFFGQKLGTVRAMPFIVIPTTSGTGSEVTSFSVITNKEKAIKYPLITDAILPDEAILDADLVKSVPPAITADTGMDVLTHALEAYVSTKANDYSDAMAEKVIQLVFTYLERAYKDGNDLEAREKMHNASCLAGMAFNITSLGLNHGIAHTAGAKFKIPHGRMNTLLLPHVISYNAGITSDFGNNPDNRAAERYTAIAKLLKMPASNTRLGVRSLINAIKQLQKKLNMPTTLTECGISRTDLNENIAQIAEGALNDGCTATNPRTPTETDVSAILEKMLA

SEQ ID NO: 621 - protein, 289 aa, Listeria monocytogenes
MKKRGLLLVSVLMLFIFLTVACGSSEDNEESGEISTKEIELTVDDPIIPTDENGEATIEGTVDPKSKLTIDGKAVKKDDSGRFTYTYSLTNDNVAEVDVKLLAVRKNYKDEKYTITITNNSKAYNDNMVKQEAIQKEEAEKAEKERKEAEEKAKQEEEAAAAKAATTDENTPSDDTVYGTLASKDTLTKEGDAFYKDEALDVLYSTVENDEIFQVLIQLGDESTIRKDLDKNHLTELARDYMESDATLIQTVSDESFVYESPSINKTYTVDYMLNDEGYVIAVYVTQAK

SEQ ID NO: 622 - protein, 130 aa, Listeria monocytogenes
VAQVQYYGTGRRKSSVARVRLVPGDGKIVINNRDWEDYIPFAALREVIKQPLVATETLGNYDVLVNVHGGGYTGQAGAIRHGVARALLQVAPEYRPALKSAGLLTRDSRMKERKKPGLKGARRAPQFSKR

SEQ ID NO: 623 - protein, 145 aa, Listeria monocytogenes
MRTTYMAKPGEVERKWYVIDATGVSLGRLSSEVASILRGKNKPQFTPHIDTGDFVIIINAGKIGLTGKKATDKIYYRHSQYPGGLKSRTAGEMRTNNPEKLLELSIKGMLPKNSLGRQLFKKLHVYGGSEHEHAAQQPEVYELRG

SEQ ID NO: 624 - protein, 248 aa, Listeria monocytogenes
MTRYKAIISYDGSGFYGYQVQPNTRTVQAEIEKALTKMHKGKTVRVTASGRTDTGVHAKGQVIHFDSELDITAEKFQKALQVMTPFDISFLTVEEVPDDFHARFGTVGKEYRYVVKRTKIFDPFSRNFALHYPYELDISKMKLASKRLIGEHDFTSFCSARTERDSKVRTLYSIDFYEEDDETLVIAFQGNGFLYNMVRILTGTLLDAGQGRISPDDISEALLARDRQKLISKTAPPQGLYLWRVDYE

SEQ ID NO: 625 - protein, 265 aa, Listeria monocytogenes
MMDKMILGRYIPGNSWLHRIDPRAKITAVMAFIAIVFLANNWLTYALMFVYVLYLVLTSKVPFLFFIKGLQPIFWLILITLLLQVFFTKGGTVLVDLGLLQITTLGLANGAMMFCRFVLIIFMTTLLTLTTSPIELTDGLEKILAPFRLVHLPVHELALMLSISLRFIPTLMDETEKILKAQKARGVEFTSGKWSDRIKAIIPLLVPLFISAFKRAEDLAIAMEARGYRGGKGRTRFRLLRWRFADTFLLISLAVLSGLLFWLRS

SEQ ID NO: 626 - protein, 288 aa, Listeria monocytogenes
MEIKLEQLGYCYQKNSPFEKRALLDVNVSFDSGSYSAIIGHTGSGKSTLLQHLNALLMPTEGKITVGDREIVAGVKQKKLRDLRKKVGIVFQFPEAQLFEETVEKDICFGPMNFGVSEEDAKLRAKKVIYEVGLTEEILSRSPFELSGGQMRRVAIAGVLAMDPEVLVLDEPTAGLDPHGREEIMEMFYNLHKEKGLTTVLVTHSMEDAARYAEKIVLMKAGTVLQIGTPREIFAKPDELVDLGLSVPDVVRFQGLFERKFDVKLTKTCLTIDELTTEMAPYLAKGGA

SEQ ID NO: 627 - protein, 279 aa, Listeria monocytogenes
VAESFVRLEHVFYKYEDTEKYAVKDVSISAQKGEWVALVGHNGSGKSTIAKLLNGLLFPEDGLIKIGHFVLSEKNIWEIRRQVGMVFQNPDNQFVGATVQDDVAFGLENHGVPHDTMVERVESALNEVGMQSYALHEPARLSGGQKQRVAIAGVLALQPDVIILDEATSMLDPRGRAEVMETIRIMREQEDITVISITHDLDEVLFADRVIVMNKGEIHSEGTPKEIFQQADAMREIGLGVPFIIELQEKLVAGGFETGSTVLSEGALLDQLWKLNSNN

SEQ ID NO: 628 - protein, 220 aa, Listeria monocytogenes
MLADFILRLVVAGLLGAIIGLDREIRAKEAGFRTHFLVSLGSALIMIVSQYGFSQIATMQNVSFDPSRVAAQVVSGIGFIGAGTIIIQKKFVRGLTTAAGLWATAGIGLAIGAGMYWVGIAATLLTLIGLEFLSIIFKSFAFHTTAIIYSTDKQENLVKVTDQIKQNKQQIVSYSSEKELIGESLFIRVNIVVKTKNKNDEYELFHFIQTLPNVTVEKME

SEQ ID NO: 629 - protein, 296 aa, Listeria monocytogenes
MKNFVTSERSIFEMEKSTEPAIRVKDGSVVKIKTKDHFNGQIHAKQLHYGELDWKQFSPTTGPIYIEEARPGDLLAITIEKIELLGTEVFLLNGPNIGITDDLLTSNSTRCYKVENNQIIYSEDIHIPIRKTIGLLKTEELNPSKVPTKNGGLLDSSKITEGATIFLPVEKYGASLHVGNVRATTGFGKITATSAEAPAEVTLRLQILKNRTAPTPTIIHYHNLICLASDITIEKATQKTMHNMITLLTESDKMTTEDALFLISLQADFQVCKLCKPNITTSIKLPLDYFPEMPFL

SEQ ID NO: 630 - protein, 364 aa, Listeria monocytogenes
MRPLTDSQIAQNRLHNSGLLQSKFPTAEEATRALFGIQSQYQQFGEISLFNRVDNLTKENLQITYDKKDLIKIWGQRMTVHMYAPDDWFYVHDVYAHKNNWSRKHTDSLGHDLDDLLAEMEELLLRDEKVPKEAFGALFGDHAKELMTWGGVFIQGSLDGKLFCVPESPKTRFYSHRSRIDSKSHEEWLNIERNQTGLETMIDRYFSAYGPATIQDFKHWSGLRNSEYMTTLEKQLENYFCYIGEDGKTYYSKTETHDEQEMDTPLLLGKFDPLFVSYAKKNWLANEKETSLIWRIAGQIEAVLIINGQFFGTWRYKVSGEKIIFNFYLSKKLTKKSQKIVEIEAMKLAGFLHKKYQGSIFELI

SEQ ID NO: 631 - protein, 135 aa, Listeria monocytogenes
MGYRKLGRTSSQRKALLRDLATDLIVFERIETTEARAKEIRKVVEKLITSGKKGDLHARRQAAAFIRHEVVEVVQVDAKGKDGSTVKKNRPVYALQKLFDDVAPRYAERQGGYTRILKKGPRRGDGAPMVIIELV

SEQ ID NO: 632 - protein, 75 aa, Listeria monocytogenes
MAIVLRLDRVMADRKISLNQLSQEVGVANVNLSKIKTGKVSAIRFSTLNEICKVLSCQPGDILEYVADDSVENEL

SEQ ID NO: 633 - protein, 177 aa, Listeria monocytogenes
MDKYNELQTVLKNKEKVLIIGPNGAGKSTFATELGKHYDFEVCHLDKLFWQENWNAVAKADFEDKVDNIMSSKKKYIIDGDYFFNLEKRLEHADLVIWIKIPLFLCVANIIKRRFKYMTNVRPDVTEGCDEKLNLSFLLYALKYNKRSGKQTKELLDNVYDKELFVIDSYKKLKSYC

SEQ ID NO: 634 - protein, 389 aa, Listeria monocytogenes
MKEVVIIDAVRTPIGKFGGSLKDISAVDLGATALKGVLERANIAPERVDQVIFGNVLQAGLGQNVARQIAIKAGIPYKVPGVTINEVCGSGLKSVMLGRQAIQLGEADIVAVGGTENMSQAPLLLNPELAGEEINPKKLRNSMLIDGLTDVYGEYHMGITAENVAEKFSVTREEQDEFAHNSQMKAASAQEKKLFEEEIIPVKLPDGSFFEADETIRANSTLEKLATLKSVFKEGGTVTAGNASGINDGASAIILMSKEKAVAENIPYIATIKVTSEVGVDPALMGYAPYYAVNEALTKGGYSIDEIDLFHLNEAFASQSVAVARDLKIPEEKLNIYGGAIALGHPIGASGARIIASLLNELKHENKHIGVASLCVGGGIGIAIILERA

SEQ ID NO: 635 - protein, 388 aa, Listeria monocytogenes
MKIGIDKIGFYTPAFYVDMVELAEARNIDPNKFTIGIGQDKMAFAPITQDSVTMGANAALQILDEEDLKKIDLVILATESGIDESKAGAVYIHRLLGIQPFSRAIEIKEACYGATAGINLAKDYVAKHPDSKVLVIGSDIARYGLATGGEATQGAGAVAMVIAADPRCITLEDDNVFYTEDIMDFWRPVYSEYACVEGKYSTEQYIHFFQTIWEKYSAKFGKNLEDFAAICFHLPYTKMGKKALDTIIETAPSDVQEKLLENYRLSTLYSRNVGNIYTGSLYLSFISLLDNQPDLQAEDKIGFFSYGSGAVGEFFHGVLQPDYKKYIRKDEHAELLANRTKLAIPDYETKFKQQLPKDGSIFEVDPASDPAAIVLTGIQEHKRQYIKK

SEQ ID NO: 636 - protein, 199 aa, Listeria monocytogenes
MKRYFIILILPILSIFAAVTMYFSWFQGWLYFYLKHVMATVSHMGYITIGITAILLYFVAVQLVNWKINKALLVFCYIIYFSILLCLLFGKASDTQGFSSDTFGFVDTFLSGNLRVIIVGNVLAFLPIGFLLKKLGFFTALLSAGMLIFAVEGAQYMLHVGFFDTGDVFLNVCGIMLGYIVIRFLSPRKYKELKVKPTS

SEQ ID NO: 637 - protein, 414 aa, Listeria monocytogenes
LAYTKEEKSWIFQDWANSAYSIMITTAILPIYFKGVAANAGIADTTSTAYWGYANSIGTLLISLLAPILGTIADYQFFKKRFFGIFTAIGIGFTFLLIFIPTDAWLLLLGFYVLSLIGFSGANIFYDAFLIDVTTNDRMDKVSSAGYAYGYLGSCIPFIIFIIFQATGILPISDVALVNIGFVMTALWWLFFTIPMWKNVHQIHYIPAVKRPVRTSFKRLFHTISHISEHKNIVIFLIAYFFYIDGVDTIFRMATSYGIDLGISQTTLILILLMTQLVAFPFTLLYGYLAKRFSAKPLIFTAIFVYIIICIYAVFMKSALDFWILAMLVGTSQGGIQALSRSFFGKIIPKKRSNEFYGFYNIFGKFSAIMGPALMGVITQITGKTQYGVASLIVLFLVGGILFVFVKEKNLENL

SEQ ID NO: 638 - protein, 422 aa, Listeria monocytogenes
MEKHLFVISLDALGALDLKDTTDLPVLRELIKTGTHIQEVETIYPSLTYPAHTSIITGHYPATHGIINNTKVQPEKDSPDWYWYKKAIQVPTLYDLAKEKGMTTAAFLWPVAAKSGIDYNIAEIFPNRFWLTQMMVSLHASSPLFLIDMDRKFGHLRKGINQPDLDKFLTASVVDTIKAKKPRLLLTHLVDMDSMRHAHGVDSPEAKAALKRHDERLAAIIQAAKEAGIYENTVFAILGDHYQINVTHAIRLNVLFAEQGWITVVDNKITEWNVYAKSCDGSSYIYTKNDLHNQEIQHLLQSMAEIEEILPKEEIVLRGADPDATFMVEGKAGYYFMDDLYGPIYEKVTDEMLGKPGYYKAVHGYSPKKPAYKTTIIFNGPGIKKGDKISNAHLVDEAPTFAHILDLQFPNTAGSVIEAIFE

SEQ ID NO: 639 - protein, 345 aa, Listeria monocytogenes
LKELSLFLQNRSVRRVGVFILIAFVLYLLRSQMNIILLTFIFSYLITRLENFILRRISIYRQIIVLLLYVLIAAVIIFVFVKYIPVLADQINQLVKFGNTFLTTDSNNDFINYIVSLANQFDIMKYTEQGVSMILTYLTNVGTVLMNVFIALMLSLFFSLGKEHLVSFTNQFSTSKIGFIYEEVKFFGSKFVATFGKVIEAQFIIALVNAILTTIALWILGFPQLMTLSIMVFLLGLIPVAGVIISLVPLTIIGYSIGGVEYIFYILVVVIIIHALESYVLNPKLMSAKTNLPVFYTFIILIFGEHFFGIWGLIVGIPVVMFFLDVLGVTNQEEIEQPKDTISHT

SEQ ID NO: 640 - protein, 298 aa, Listeria monocytogenes
MNNLQTKFPHIAIKLNEPLSKYTYTKTGGAADVFVMPKTIEEAQEVVAYCHQNKIPLTILGNGSNLIIKDGGIRGVILHLDLLQTIERNNTQIVAMSGAKLIDTAKFALNESLSGLEFACGIPGSIGGALHMNAGAYGGEISDVLEAATVLTQTGELKKLKRSELKAAYRFSTIAEKNYIVLDATFSLALEEKNLIQAKMDELTAAREAKQPLEYPSCGSVFKRPPGHFAGKLIQDSGLQGHIIGGAQVSLKHAGFIVNIGGATATDYMNLIAYVQQTVREKFDVELETEVKIIGEDK

SEQ ID NO: 641 - protein, 328 aa, Listeria monocytogenes
MIRFDNVSKKYSDDKTAAVNNVTLDIKDGEFFVFIGPSGCGKTTTLKMINRLIPLTTGTIYINEKRISDYDIHELRWDIGYVLQQIALFPHMTIEENIAIVPELKKWSKEKIHDRITELLDSVGLDPESYRHRKPAELSGGEQQRVGVVRALAADPGIILMDEPFSALDPISRQRLQQDISALQKKIKKTIVFVTHDMQEALALGDRICVMQGGEIVQVATPQEIMKNPENDFVKDFLASGHAFNTPILEANFTVNDLIEADLFYSYQTSDGTLGISSTEPVENLVRRIAEEQSIPVTDEAGNYIGTVSNKHVMQFLARHLESSGELV

SEQ ID NO: 642 - protein, 504 aa, Listeria monocytogenes
MNTLIDTFTVRKDELFTALVQHIQISFVSLFIAVLIALPLGIYLTRHKRLAEPIIQVAAIFQTIPSLALLGLLIPLVGIGIVPAIIALVIYALLPILRNTYTGIKEVDPALVEASRAMGMNKWKRLYKVQLPLAMPVIMAGIRTAMVLIIGTATLAALIGAGGLGDLILLGIDRNDNSLILLGAIPAALLAILFDFLLRFLEKASFKSTIITISAGILLTAAIIVVPYFASDKKEITIAGKLGAEPEILINMYKLVIEDETDLKVNVKPNMGKTSFVFNALKSGDIDIYPEFTGTVLETFLKENAKTHDPEEVYTQARDGLAKDFDMTYLKPMKYNNTYALAVSPEFAKENNLEKISDLGPVSDQVKAGFTLEFKDRSDGYKGIQDKYGLTFSNLKTMEPKLRYNAIKSGDINLLDAYSTDSELAQYKLKVLEDDQQLFPPYQGAPLMLTKTLDKYPELKKPLNKLAGKITDDEMRKMNYEVNVNGKSAYTVAKDYLKDQGIIK

SEQ ID NO: 643 - protein, 291 aa, Listeria monocytogenes
VEIKTRCPASCGELLQGWILGGEKLISYPINWYSEVTLSDKVGLNSSGHTKAWLAFQVTCEYFGVAKRDLPQVSLQVKSTIPVAKGMASSTADIAATIGATAKWLNKSITEIEIVKLCLKLEPTDSTIFESLTLFDHLKGDVIQNFNWIPKLGVVVLEPLTVLETATYRQENHQAQLLKNEGQLAKAMDYFQQAVTQKSIRLLGEAASISAACNQTILPKPFWKEILEVTENLDLVGLNVSHSGTVVGILYELEKTDPLEILFELERRYVTTFYSRYYFREFVSGGVQIIS

SEQ ID NO: 644 - protein, 276 aa, Listeria monocytogenes
MTDKLLKQHKRLLEQQHKLPYTINLDGEVFTIIIYTKLSKVAGVTVLNSQEEPATVKEAEAVVNRIQKYNFYFEYLGKRAHVIKERDSIIAEKIEQTQLILNDNTIFGEKMQPTIDELNLAMEVYKQQQRKMDVYQEDITLLNQKIKMQGEILEEDWESAENLSIAFAKAAYAQSIYLEATRKNRKQLAKWFHLHQKELPTDKQKALGKMVSVLSDTNAGLVFDQIISLRPLLEEGLMLDHEQSLTQRAAEFNKEFETHCRFYKPNINKVKNLIRQ

SEQ ID NO: 645 - protein, 448 aa, Listeria monocytogenes
MKKDKTERTKQSWRKAQNAPSLSEVNNSVAIPKNAKFFRKLFAFMGPGALIAVGYVDPGNWATSIAGGSEFGYTLLSVILISNILAVLLQSLASKLGIVTGRDLAQASSDHFSKPFGFVLWILAELAIIATDIAEVIGSAIALNLLFGIPLIWGVCITALDIFLVLFLQHKGFRYIEVIVITLMVTILVCFGAEMVMSHPDMQAIAKGFIPQSEIVTNPAMLYIALGILGATVMPHNLYLHSSIVQTRQYARTKEGKKEAIRFSFIDSTFSLTIALLINASILILAAAAFYTTGQHNVAGIEDAYKLLNPTLGSSIASTVFAVALLASGQNSTLTGTLAGQIVMEGFLNIRLKPVVRRLLTRVLAIVPAVIITALYGANGINELLIFSQVILSMQLSFAVIPLVMFTSDKQKMGEFVNPTWLKIISWAVAIFIAVLNIYLLFYTLTSL

SEQ ID NO: 646 - protein, 223 aa, Listeria monocytogenes
MDTLKQLIDYYQTNGSYVMEEFWRHFLMSAYGVIFAAIIAIPLGVYIARKKRLAGWVIQIANIIQTIPALAMLAVLMLIMGLGTNTVVLSLFLYSLLPILKNTYTGIRNVDGALLESGKAMGMTKWQVLRLIEMPLALSVIMAGIRNALVIAIGVAAIGTFVGAGGLGDIIVRGTNATNGTAIILAGAIPTAVMAILADVLLGWVERTLNPVKNKRKPLTEAL

SEQ ID NO: 647 - protein, 308 aa, Listeria monocytogenes
MKKKFIALFSVLLLTSSLFLSSCSLPGLGGSSKDTIRIGAMATTESQIVSNILKELIEHDTGLKVEIVNNLGSTIVQHQAMLNGDVDITATRYTGTDLVGPLGEEAIKDPEKALAAVKKGFEERFHQTWFDSYGFANTYVFMVRQDTAKKYNLNTVSDMRKVENELTAGVDNSWMEREGDGYKAFSKAYDIEFKKIFPMQIGLIYTALKNNQMDVALGYSTDGRIPTYNLKLLKDDKKFFPPYDASALATDEILKKHPELKTTINKLKGKISTEEMQKLNYEADGKLKEPSIVAQEFLQKNNYFEGKN

SEQ ID NO: 648 - protein, 218 aa, Listeria monocytogenes
MDAIVTFFQENGHNLLVQTWQHLFISLSAVILGIAVAVPTGILLTRSPKVANFVIGVVSVLQTVPSLAILAFIIPFLGVGTLPAIIALFIYALLPILRNTFIGVRGVDKNLIESGRGMGMTNWQLIVNVEIPNSISVIMAGIRLSAVYVIAWATLASYIGAGGLGDFIFNGLNLYRPDLILGGAIPVTILALVVEFALGKLEYRLTPKAIREAREGGE

SEQ ID NO: 649 - protein, 397 aa, Listeria monocytogenes
VLKFEHVTKTYKGGKKAVNDLTLNIDKGEFVCFIGPSGCGKTTTMKMINRLIEPTEGKIFINDKDIMAEDPVKLRRSIGYVIQQIGLMPHMTIRENIVLVPKLLKWSEEKKQERAKELIKLVDLPEEFLDRYPYELSGGQQQRIGVLRALAAEQNLILMDEPFGALDPITRDSLQEEFKNLQKELGKTIIFVTHDMDEAIKLADRIVIMKDGEIVQFDTPDEILRNPANSFVEDFIGKDRLIEAKPDVTQVAQIMNTNPVSITADKSLQAAITVMKEKRVDTLLVVDEGNVLKGFIDVEQIDLNRRTATSVMDIIEKNVFYVYEDTLLRDTVQRILKRGYKYIPVVDKDKRLVGIVTRASLVDIVYDSIWGTLEDATENQEEQADSKTTEPEMKQEG

SEQ ID NO: 650 - protein, 186 aa, Listeria monocytogenes
MQNKRLIILLECAIFAAVAMVLSFIPLDIGSSFSISLGMIPMYVIAIRRGFWAAGFAGLLWGLLHFLTGKAYILMPSQAIIEYILAFSFIAFSGVFSKQVRSNLAANQLKKAIEWAWGTMIIGGLARYFWHYVAGVLFWGAYAFQGWGAQLFSIVMNGASCLGTVLVSGIIISILLKTSPKLFLPK

SEQ ID NO: 651 - protein, 90 aa, Listeria monocytogenes
MKILAVCGLGQGTSLILRMNVETVLRDMGVDADVEHIDVSAARSMNVDIIVTSQELAETLGTDTSAKVVIVNNYFDNAEIKNALSAAINS

SEQ ID NO: 652 - protein, 127 aa, Listeria monocytogenes
MDYEQTLQEKVALCLTLQAAKETFPFDKKTHALTVGGKIFALIHLYHGDLYISVKCQPERIDLLRDEYLSIKPGYHLNKKHWITLVINEKYDVEAETEFALIQNSYQLIFDKLPKKAQNTVKFSAND

SEQ ID NO: 653 - protein, 533 aa, Listeria monocytogenes
MLTVNNVGLRYGDKKLFEDVSIKFLPGNCYGLIGANGAGKSTFLKVLSGELDSQSGNVHIGSGERLAVLRQDHFQYDDELVLNTVIMGHERLYKIMDEKNAIYMKEDFSDEDGIRAAELEGEFAELDGWEAESDAAVLLNGLGIPTDLHGKLMKDLTGGEKVKVLLAQALFGKPDILLLDEPTNHLDIRAIHWLEEFLINFDNTVIVVSHDRHFLNKVCTHIADLDFSKIKLYVGNYDFWYESSQLAQTMMGDRNKKKEEKMKELQDFIARFSANASKSKQATSRKKMLEKITLEDIQPSSRRYPFIQFKPDREVGNDLLTVTNLSKTIDGVKILDNLSFSINRNDKVALVGDDEVAKTVLFQILAGEMEPDEGSYKWGITTSQSYFPKDNSEFFEENDMSLVEWLRQFSPEDDSEAFLRGFLGRMLFSGDEVLKKVRVLSGGEKVRCMLSKMMLSGSNVLLLDEPTNHLDLESITALNNGLEAFKGAIIFASHDHQLLQTIATRIINLSKDQFYNKEISYDEYLKEVMNVAE

SEQ ID NO: 654 - protein, 216 aa, Listeria monocytogenes
MEIWIIAGICAFLIFIAGIVILFFPARRKIGAILTSAGMLLMVGSIIGIIVSFSHYQQVQNDVFNYSSKGTSQATPEETKTYKVNYEDSADNIKKKITTVTVEKKETYSTSASKPVDGSITIALEITNNAAKTLETYPNQGQLEANKLDLNGGDAVLSNFDTTEIKPGETAKGKIIFPVDDLDKVSDITWISYSFLSYLKDSSTPITTETGKIELK

SEQ ID NO: 655 - protein, 446 aa, Listeria monocytogenes
VAKFTYDVVIIGSGASGTTVAFEAQAAGLKVAIVEERNWGGTCVLRGCDPKKVLIGAREARNLSTRLRGKGIKQAATISWTDLMAFKETFVENVPESRLASFQEAGIETFFGAASFQDSHSLQVGDDLIYAEKIVIATGATPSTLKVEGKEYIQTSDDFLSLEKLPDSVVFIGGGYISFEFASIALAAGRDVHIIHHNSEPLKKFDPDFVAALVANIKDEGIHFHFDTDITKIENDGGKLHIKGKDSFSLQTDLIIGATGRMPNIAHLSLENASIDYTKKGIVVNEKLQTPNNPHIYACGDVAATKGAPLTPVVSLEAALVAKNVIGVNEKITYPAIPSVVFTSPKLASIGISTEEAKANPEKYQIKNHDTTSWYTYKRTNEQIALAKIIEDRESGQIKGAHFLSEEADYMINYIAILMKANLTLADLQSVIFAYPSPASDLTALN

SEQ ID NO: 656 - protein, 555 aa, Listeria monocytogenes
LTIKKAKNIKIIPLGGVDESGKNLYVVEIDEDIFILDAGLMFPENELLGIDIVIPDFKYLEENKDRVKAIFLTHGHEDAIGALPYLLQKIKAPVYGTELTIALAKSALKEHRKLRFKNFHVVNEETTLSFSKIDVSFFRTTHTIPDSVGIVLETSEGSIVYTGDFKFDQSAKDGYASDLSHIAEFGEKGVLALLSDSSEAEHPGTTSSDSLIEEEIRHAFRMADGRIIVACVASNLIRLQQVLDASVATKRKVAIVGKELERVFEIAGSLGKIVIEEDLIVPLKELKKYSDDEITIIETGNLGEPIQSLQLMTKGNHPQLNIKPGDTVYITTTPSPSLETMMAKTMDMLYKAGAKVLTMSNNLFISGHASQEDLKLMINLLKPRYFVPVHGEYRMLISHAKLAHEVGMAKSEVFIVGKGEILEYKNDKMTAGNRVYSGNTLIDGLGVGDVGNIVLRDRKLLSEDGIFIVVVTLNRKSKTITSGPEIISRGFIYVRESEHLIEESSKVVTKIVEKNLQETGFEWAKLKQDIRDQLNRYLFEQTKRRPMILPIIMEV

SEQ ID NO: 657 - protein, 293 aa, Listeria monocytogenes
MDLGKVITAMVTPIHPEKDKVCKKRIHHLVNHLIKNGSDGLVIAGTTGESPTLSHDEKIKLFRQVIETNDGRAKLIAGTGSNNTAETIAFTKEVATLGGMDAVLIVAPYYNKPNQDGLYAHFAAVAEASDLPVVIYNIPGRSVVNIEPETIIRLAKLPNIVGVKESSGNLDNISKIIAETSDDFQVYSGDDSLTLPILAVGGNGVISVASHIVGNEMQEMIQAFERGEVQKAAQIHRELLPLMNGLFSVPNPAPTKYLLNQQGISVGPVRLPLVDLNAEQGTKLQAILEGLSK

SEQ ID NO: 658 - protein, 403 aa, Listeria monocytogenes
MKIIVQKFGGTSVQNEKSRLMAFNHIKQVLKEGYKVVVVVSAIGRYGDPYATDTLLELIGAKNTKLTAREQDTLLSVGETISASVFTNMLKEANIKAEAFSGGQAGIITSDDHLNAKITEVDTARLKDALTNLDVAVVAGFQGITANGDISTLGRGGSDTSAAALGVSLQANYIDIFTDVDGMMTADPRIVEHARSLPRVSYNEVSNMAYQGAKVIHPRAVEIAMTAKIPMRIRSTYLESTGTLVTSLADDSGHFDVKERMVTGVAHVTNLTQISVQADTVKAQQLAFKILADAGISLDFINISTNSVIFTVPEEKSHVVKQLLEDADLQTTVRQACAKVSIVGAGITGVPGVTAKIVGALSEKNIPILQSADSHTTIWVLVREKDLISAVNALHDVFCLEIK

SEQ ID NO: 659 - protein, 347 aa, Listeria monocytogenes
MTKSYHVAVVGATGAVGTQMIELLEEAATFKIKQVSFLSSIRSAGKKLSFRGEEVTIQEATPESFEGVDIALFSAGGSVSKALAKEAVKRGAIVIDNTSAYRMDPTVPLVVPEVNEKALFSHNGIIANPNCSTIQMVAALEPIREAFGLNRIIVSTYQAVSGSGVSAIQELKDGSKAVLDNKEFTPQIMPVKGDKKHYPIAFNALPQIDVFTENDYTYEEMKMINETKKIMEDNTIKVSATCVRIPVVSGHSESVYIEVDKEGITAKEIQNALKNAPGIVLEDDPANQVYPQAVQAAGKKEVFVGRIRADIDDPKGFHMWIVSDNLLKGAAWNSIQIAESLVKLAII

SEQ ID NO: 660 - protein, 721 aa, Listeria monocytogenes
VKLNFRKKKKDSTKKKRAIIPLRLNILFFIIFILFSVLILRLGIVQIVQGDTYKRQLEETDNVTVSKNVPRGSIYDRNYNLLVGNSAVKSITYTRSQQTQTAETLHVAQTLEKLITVEPEKLTDRDLKDYWILTHQTESLNRLSAKEQALDSSKAYKIQVDKVTKEDIASLTSEDLKVATIYKKMTTGYAMTESVVKNKDVTDEEIARVSENMDSLPGVDTTTDWNRYYTYDETLRSILGSVSTAKEGLPKDKAEYYLSQGYSRNDRVGKSYLEAQYESVLAGSKSQSESVLDSKGNIIETVNKYEGSKGKDLVLSVDVEFQKAVEEILQKNIKQGKQYAGSDLFDRAFVVAMDPYSGEVLALAGQKLNDKGEFEDYSLGTFTTAYAMGSAVKGSTILGGIMDGAITNKTVFTDQPIVLKGTKPKSSWFNRTGAGNRPLDPVGALEISSNSYMYQVAMKMGGANYVPNGPLRAPLSTFDDMRYYYNQFGLGVKTGIDLPGEQTGYKGDDQTIGKILDFAIGQYDSYTPLQMAQYVSTIANGGSRIAPSMVKEIRNPSTNGDSVGTLATANEPKVLNKIGVSESDIKTVQQGFYEVTHGSTGTARTVFTSSDYDVAGKTGTADAFYDGPKEGNKMASVWNTTFVGYAPVEKPEIAISVVVPWIYRPYGTDQKTNMKISKEVFDKYFELKKERSESKKDTSKVEQPINNKEAAAKAQSEQTEN

SEQ ID NO: 661 - protein, 202 aa, Listeria monocytogenes
MTYELPKLPYTYDALEPNFDKETMEIHYTKHHNTYVTKLNEAVAGHPELASKSAEELVTNLDSVPEDIRGAVRNHGGGHANHTLFWSILSPNGGGAPTGNLKAAIESEFGTFDEFKEKFNAAAAARFGSGWAWLVVNDGKLEIVSTANQDSPLSDGKTPVLGLDVWEHAYYLKFQNRRPEYIETFWNVINWDEANKRFDAAK

SEQ ID NO: 662 - protein, 266 aa, Listeria monocytogenes
MNIFKRFWKSLYSPADIASFRNDKIRKSIVYIIVLSFVTFLPLAYFTNVTTKNALKVGEETITNEIPNFKVTDGKLVLTDKNAKNIPISIDQDELHIYFDASGTLDKDDVDNKIASYDSAVAFLSDSIYITAAGVSQSVSYDTAGISDKADLVHLYNSIESLAKYFIPIALLVLFIFTLGSVFFRVALYALFGFILSGFGRTGIAFRQNWMIASYSITLAAVFTMIMEALQIIVPFGMEINMVVSMIFVFLAIRSIPPSEPTILEK

SEQ ID NO: 663 - protein, 368 aa, Listeria monocytogenes
LNERIFRENTRPVQVGNLTIGGSEELTIQSMTTTKTHDVEATVAEIHRLEEAGCQIVRVACPDERAANALSAIKKKIHIPLVADIHFDYRLALKAIDAGVDKIRINPGNIGRRDRVEKVVNAAKAKNIPIRIGVNAGSLEKKIIQKYGYPTADGMVESALAHIKILEDLDFYDIIVSLKASDVNLAIEAYDKASRAFNYPLHLGITESGTQFAGGIKSAAGLGAILSLGIGNTLRVSLSADPVEEIKVAREVLKSFGLSSNAAMLISCPTCGRIEIDLIRIANEVENYIAKIEVPIKVAVLGCAVNGPGEAREADIGIAGSNGEGLLFRHGKIIRKVPEAIMIDELKKEIDILAEEFFVKKIDLESLR

SEQ ID NO: 664 - protein, 235 aa, Listeria monocytogenes
LEKENELSFYDGVKACLPTVLGYAGIGIAAGVVGKASHLSLLEVTLLAIIVYAGAAQFIISGLLLLQSPISAIIFTTFLINSRHFLMSMAEAPHFKKYSLWNNIGIGSLLTDETFGVSMNHIGNKKPVSAKWMHGINITAYLAWIVACIVGAFIGNWLPNPEQFGLDFALSAMFIGLLYLQVVSDKSKKMSTSLLVMVLVALFLILFMRVMTPELAILTATLLGCLMGVILERWR

SEQ ID NO: 665 - protein, 108 aa, Listeria monocytogenes
MALSSYTLFVIIGCGLVTFIPRVLPFIFVRKLQLPDVVIRYLSYVPLCILTALFVQSLLITRENSFPGINIENLLASLPTIITAILTKNLMWIVVVGIISMALIRLFA

SEQ ID NO: 666 - protein, 294 aa, Listeria monocytogenes
LTKLKKVMISVIAATLLLLAGCGSSAVIKTDAGSVTQDELYEAMKTTYGNEVVQQLTFKKILEDKYTVTEKEVNAEYKKYEEQYGDSFESTLSSNNLTKTSFKENLEYNLLVQKATEANMDVSESKLKAYYKTWEPDITVRHILVDDEATAKEIQTKLKNGEKFTDLAKEYSTDTATSTNGGLLDPFGPGEMDETFEKAAYALENKDDVSGIVKSTYGYHLIQLVKKTEKGTYAKEKANVKAAYIKSQLTSENMTAALKKELKAANIDIKDSDLKDAFADYTSTSSTSSTTTSN

SEQ ID NO: 667 - protein, 141 aa, Listeria monocytogenes [sequence omitted]

SEQ ID NO: 668 - protein, 397 aa, Listeria monocytogenes
MHKIMAINAGSSSLKFQIFTMPGEEVLVKGLIERIGLPDAIFNMSFQNEKIKETRAINDHGKAVEILLEQLKAHQVINDLSEITGVGHRVAHGGEDFVTSCVVTDEVVKGIEAVTNLAPLHNPANIIGIKTFRELLPNAVSVAVFDTAFHQTIPQENFLYALPYELYEKHHIRKYGFHGTSHKYVAGKAAEVLEKPLEKLKIISCHLGNGASVCAIEAGKSVNTSMGFTPNAGLMMGTRSGTIDATIIPYLVDELGYSLDEVMHMMSNESGVLGVSGISSDFRDIEIAAKEGNSRALLTLRMFTGQICNYIGAYASAMNGCDALLFTAGVGENSPLIRQMVTEQLSYLGVTCHVTKNNAGDMIISNDNEAVKVCIIPTNEELMIARDVEKYAKQTIG

SEQ ID NO: 669 - protein, 292 aa, Listeria monocytogenes
LIATLLQYDFIRNTFIVGLVIGVVAPLLGSFIVVRKLSLMADALSHVTLGGIAVSLFLSKTYLPLAALNPLYLGFGFSVVGSLLMEKLRNVYKHFEELAIPIIMSAGMGFSVIFISLANGFNTDLFSYLFGSVSAVSRTDMITIVVTAIIVFIVILSLYKELFLLSFDEEYAKVSGLKAKVFDVIFMVLVALVIASSMRIVGILLVSSLMTLPVAAAIRIAKGFKQTILLSILFGEIAVIGGLFTAYYLNLAPGGAIVIISVLLLIVTILYQKIRQKILISKRGEENGTYSN

SEQ ID NO: 670 - protein, 257 aa, Listeria monocytogenes
MKKIIEVNNVSYHYDKEHALENIHFQVAKGSFTGLIGPNGSGKSTMLKLILGVLKKQQGSISLFGEKQADFKDWVKIGFVSQKSNAFNSAFPATVKEVVASGLTKKKGLFKTLNNKDKEDIDYALKRVEMTDYLHRNIGELSGGQQQRVFIARALVSRPELLILDEPTVGVDVENVKAFYELLAELNRTEEMTLLLVTHDLMAVNTYVNHVISINKRIIFDGSAHEYQHYLADRELEILAEQRRREDACLDCDASPV

SEQ ID NO: 671 - protein, 308 aa, Listeria monocytogenes
MTKTLVFGHKNPDTDTICSAISYAELKKAQGADIEAVRLGELNSETAFVLDYFQVTAPRLVQTVANEVSEVALVDHNERQQSVDDIDDVTVTAVVDHHRIANFETSDPLYYRAEPVGCTTTILLKMFRENEVEVSKTVAGLMLSAIISDTLLFQSPTCTEEDKVAAQKLAQIADVDIQSYGMEMLKAGADVSKKTVAELLLDAKEFNMNDNKVEIAQINVVDVNDVLSRRAEVEALMTQNIVDKGLDLYLFVITNILTNDSVGIAIGSKTAVVEEAYGVKFVENQAPLKGVVSRKKQVVPILTDTFAK

SEQ ID NO: 672 - protein, 297 aa, Listeria monocytogenes
MLRLGSHVSMSGKKMLLGASEEAASYGSNTFMIYTGAPQNTRRKPIEELNIEAGLEHMKAHDMADIVVHAPYIINIGNSVKPETFELGVNFLQSEIERTRALGAKQIVLHPGAHVGEGADKGIKQIIQGLNEALIHDQDVQIALETMAGKGSECGRTFEELAQIIDGVTHNELLSVTFDTCHTHDAGYDIVNDFDGVLNQFDKIVGIDRLKVLHINDSKNERGAHKDRHANIGFGHIGFDALHYIVHHPQLADVPKILETPYVGGDKASKKAPYKWEIAMLKNGEFDPDLLNKIQNS

SEQ ID NO: 673 - protein, 435 aa, Listeria monocytogenes
MTKKSRFDQFGFQPFIGLAIDKLGFYEPTEVQQKLIPGILKGESIIGQSQTGTGKTHTFILPIINNVNPEKDAVQAVITAPSRELATQIYNEIRKVTKYSEKEIAVQLVIGGTDKQRAIDKLKKQPQIIVGTPGRINDLIREQALFVHTAKTLVIDEADMTLDMGFLNDVDHIAGKMPANLQMLVFSATIPQKLKPFLSKYMENPRYEHIQPKVAASKTVEHRIMATRSRNKLDLLKNVLVGSQPYLAIVFTNTKTTADEVANGLIERGLKVAKIHGDVNPRERKRTMKQIENLDYQYVVATDLAARGIDIQGISHVVNYELPDDLDFYIHRTGRTGRAGHSGIALTLFEPADEDRLNQLEKMGIEFKHVDWKNKEFVTLEDRNRRAKREAKRETADPREIGMRKKAKQKGKPNYKKKINYKMNEIKRRERRKKR

SEQ ID NO: 674 - protein, 331 aa, Listeria monocytogenes
MEIIKISPRGYCYGVIDAMVIAKNASLDPNLPRPIHILGMIVHNKHVTDAFESIGIYTVDGANREEILDKITTGTVIFTAHGVSPSVKAKAVAKGLTTIDATCPDVLHTYNLILEKQAAGYEIIYIGKKGHPEPEGAYGTAPDVVHLVETKADIDALSLLSDKIFVTNQTTMSKWDVADLMHYIKGKFPKAIQHQEICMATQVRQEAVALQAKDADLTIVVGDPRSNNTARLAQVSIEKAGTKAYRIADITELDIEWIKDAKKVAVTAGASTPTQLVREVLLFLEQFDAADKTTWKREHNQDFERILPKTKNKYMAEKRSQRLAHLKNGGS

SEQ ID NO: 675 - protein, 373 aa, Listeria monocytogenes
MKVANGYEYTAIMEKIAPKKLAMEGDPIGLQVGDLSRKVRKIMFTLDVLEEVVDEAIEKKVDLIIAHHPFLYRPTQHIDTTTKQGKMIKKLIKHDITVFAAHTNLDIAQGGVNNILADLLHLQNTTMIEETYSEPYCKIAVYVPENELESVRLALVNNGAGQIGTEYTECTFHTTGIGSFKPGANANPTIGEKDALTSVPEVKIEAIFPQYLTETITKAVKIAHPYEEPAIDVYTLEMQTYKEGLGRVGMLPKKLGMVSFIDKLKTAFAIDNVRFIGDLKTTVHKVAIIGGDGNKFIHQAKSTGADVFITGDVYYHTGHDLLAINLPTIDAGHNIEKVMKGYLKNKMEEQAKILDYEAEFIVSEVNTDPFQFC

SEQ ID NO: 676 - protein, 234 aa, Listeria monocytogenes
MSAYLAEFIGTMVLIMFGNGLLAGLTLNKSLSQGANWVVVTFGWGFAVMIGIYVAGAYSGAHLNPAVTIALAVGGSFPWADVVPYIIAQIAGAFVGASIVILHYYPHFKATPPEIDTHGIFSTGPAIRNTPFNLISEIIATFAFIFGLLMIGANSFTDGLNPLILGFLVVAIGMSFGPTTGYAINPARDLGPRLAYFLLPVPNKSGSDWRYAWIPIVGPIIGGLLAIGLFNILL

SEQ ID NO: 677 - protein, 234 aa, Listeria monocytogenes
MNEEQLSKRLEKVASYITKNERIADIGSDHAYLPCFAVKNQTASFAIAGEVVDGPFQSAQKQVRSSGLTEHIDVRKGNGLAVIEKKDVIDTIVIAGMGGALIRTILEEGAAKLAGVTKLILQPNIAAWQLREWSEQNNWLITSEAILREDNKIYEIMVLAPSKKPVAWTKQEIFFGPCLLKDQSAIFKSKWRHEANTWQNIIQTISNNQPVSPENQAKIRELEHKIALVEDVLK

SEQ ID NO: 678 - protein, 374 aa, Listeria monocytogenes
MSDKTKNTKPVAELSVEQVKEALIEEGKKKGILTYAKIAARLAPFTLDSDQMDEYLEHVGEAGIEVSDDADDEDPDETELVKEETESFDLTDMSVPPGVKINDPVRMYLKEIGRVDLLTADEEIALAKRIEAGDIEAKGRLAEANLRLVVSIAKRYVGRGMLFLDLIQEGNMGLMKAVEKFDFNKGFKFSTYATWWIRQAITRAIADQARTIRIPVHMVETINKLIRVQRSLLQDLGRDPSPEEIGEEMDLPTEKVREILKIAQEPVSLETPIGEEDDSHLGDFIEDQDATSPSDHAAYELLKEQLEDVLDTLTDREENVLRLRFGLDDGRTRTLEEVGRVFGVTRERIRQIEAKALRKLRHPSRSKQLKDFLE

SEQ ID NO: 679 - protein, 319 aa, Listeria monocytogenes
MKLTGIHHVSIFTANARANFDFYTKIMGLRLVKKSVNQDDPYTYHLYYGDEIGSPGTALTFFEVPNMAKNHPSRNAISGLSLRVPSDEALHYWDKRLDEHRIFHSKPIDQFGRKIIRLKDTDGLPVNLISDETSTQVTEVTPWEDSLVPAEYAIRGLGPVRFSVFKKEKTDRLLTKILGFERIGAYEDDDKLVTVFKTGNVGLGGEVHVESRPDLEQGNLGAGGIHHVAFRVPTDGDLIGWTEMIQDLGYKNSGYVDRFYFHSLYFRESNGILIELATDEPGFQTDFTKEHGTYVDLPPHLEERREDILAHLKPLDTDK

SEQ ID NO: 680 - protein, 138 aa, Listeria monocytogenes
MVKKEERLGVLLWFRFSRFYNRNMKLTNQNLRAAGISTAQFDCIAQIGLDKEITQQQLAEKLVVTKGNVTQLLAKLEQLGYITRTKTGREKHITLTEKGQACYRENVPKQEAFQQAQFDKLTRDEQKELLKLLKKLGE

SEQ ID NO: 681 - protein, 379 aa, Listeria monocytogenes
MDQQKKIQILKDLVNIDSTNGHEEQVANYLQKLLAEHGIESEKVQYDLDRASLVSEIGSSNEKVLAFSGHMDVVDAGDVSKWKFPPFEATEHEGKLYGRGATDMKSGLAAMVIAMIELHEEKQKLNGKIRLLATVGEEIGELGAEQLTQKGYADDLDGLIIGEPSGHRIVYAHKGSINYTVKSTGKNAHSSMPEFGVNAIDNLLLFYNEVEKFVKSIDATNEILGDFIHNVTVIDGGNQVNSIPEKAQLQGNIRSIPEMDNETVKQVLVKIINKLNKQENVNLELIFDYDKQPVFSDKNSDLVHIAKSVASDIVKEEIPLLGISGTTDAAEFTKAKKEFPVIIFGPGNETPHQVNENVSIGNYLEMVDVYKRIATEFLS

SEQ ID NO: 682 - protein, 499 aa, Listeria monocytogenes
MKRNKTALRILVTLAVVLAITFWVGMSSKEVQAAVIEHPTPINEIFTDPVLTDNVKTLLGKADVTDEVTQTDLDSVTHLSAKSAGITTIEGLQYLTNLSELELIDNQVTDLNPLTNLTKITELRLSGNPLKDVSALAGLKNLKTMDLIYTDITDVTPLAGLSNLQVLNLDINQITDITPLAGLSNLQFLSFGSTQVSDLTPLANLSKLTTLNAMNSKVSDVSPLTGLSNLTEVYLEENQISDVSPLAKLPNLSIVTLTNQTITNQPVFYQNKPIVPNVVTGLSGELIAPDTISDNGTYTSPNLTWDLNSFINSVSYTFNQSVTFKNTTAPFSGTVTQPLTEVYAVVFDVDGEQTSAMVGVNELINEPTAPAKEGYIFDGWYDAKTDGNKWDFGIDKMPASDITLYAKFTENEEPNASSPINVEPNDNNSDNAEPNASSSNNVQENGTNEGINNLNSSGEDKVNIKLPITGDKLNVLPIFVGAVLIGIGLVLFRKKRQTK

SEQ ID NO: 683 - protein, 372 aa, Listeria monocytogenes
MNSFQIKTKVAFGTNSLQVLKEIKNKNVWIICDRFLADGEGLQGLIGQLDASNNVHIFTDVVPDPPISKVAGGVSEAGKIQPQVMIAFGGGSAIDTAKGIYYFAKRLEKINISTFIAIPTTSGTGSEVTAATVITDPTTKIKYPLFLDELIPDMAILDAQLVVTVPPAITANTGMDVLTHAIEAYVSKDASDYTDALGEKSVQLTLRFLTSCYDDGRNLADREKMHNASTMAGMAFNCANLGLNHSIAHQLGAQFHVPHGLANAILLDAVIRFNAFKNRETEQKYAEMARICGIASRSDSNETAVRLLRERIVAMMEHMQMPRTLTDAGVAKEKVYAKMDEIATNALKDACLPTSPTTPTHQELKEILEQII

SEQ ID NO: 684 - protein, 548 aa, Listeria monocytogenes
MKKRWNSVFKLVLMVTAILGLSLYVTTSQGVEVRAESITQPTAINVIFPDPALANAIKIAAGKSNVTDTVTQADLDGITTLSAFGTGVTTIEGVQYLNNLIGLELKDNQITDLTPLKNLTKITELELSGNPLKNVSAIAGLQSIKTLDLTSTQITDVTPLAGLSNLQVLYLDLNQITNISPLAGLTNLQYLSIGNAQVSDLTPLANLSKLTTLKADDNKISDISPLASLPNLIEVHLKNNQISDVSPLANTSNLFIVTLTNQTITNQPVFYQNNLVVPNVVKGPSGAPIAPATISDNGTYASPNLTWNLTSFINNVSYTFNQSVTFKNTTVPFSGTVTQPLTEAYTAVFDVDGKQTSVTVGANELIKEPTAPTKEGYTFTGWYDAKTGGTKWDFATDKMPAEDITLYAQFTINSYTATFDIDGKLTTQKVTYQSLLEEPVAPTKDGYTFTGWYDAKTGGTKWDFATGKMPAGNITLYAQFTKNDNPNPDDPTTNTPTGNGDGTSNPSNSGGNTTLPTAGDENTMLPIFIGVFLLGTATLILRKTIKVK

SEQ ID NO: 685 - protein, 490 aa, Listeria monocytogenes
MKQRKTSVLHVLLVVTAILGISLWVNASHGMKAQAESIAQPAPINEIFTDPALADEVKTELGKTSVTDEVTQTDLNQITKLEADDKGINSIEGIQYLTNLNMLGVSSNQITNITPLANLTNLDSLYLGDNKISDVTPLSGLTQLTFVQLSINQIKDVTPLANLTKLNYLDLRENQISDASPLVNMTDLTVLHLEKQQITAAPVVYQTNLVAPDILKNAYGEVVPPTTISNNGTFASPNITWNLDSFTSEVSYDFNQKITLGDNGKVTFAGTVVQPIVEAPVNYITTFDVDGTTTTENVVVDTLITEPAEPTKEGYTFSGWYDAETGGNEWDFAVDKMPATNMTLYAQFTINSYTATFDVDGETTNQKVDYQALLQEPTAPTKDGYTFVGWYDAKTGGTEWDFATSKMPTSDITLYARFTKNPSSDNSQTAPGKDDKNDKDKLTIKANDSADATSTKLPKTSDDSSMIPTILGTLFIGGAILILRKKTTNI

SEQ ID NO: 686 - protein, 486 aa, Listeria monocytogenes
MTEVKKQFPKGFLWGGATAANQVEGAYDVDGKGLSTADMVKFIPKEERTKDLELDVSKAEIEAIIAGKVEGRFPKRDGVDFYHHYKEDIALFAEMGFKTFRLSLNWARIFPNGDDKEPNEKGLEFYDKVFDELLKYDIEPLVTLSHYETPLNLTLKYNGWADRRVIGFFTNYAETVFKRYKNKVKYWLTFNEINVISLSAYTGGGVLLEDAKNPLELSYQAGHHQFVASALATKLAHEIIPGSQVGCMLARMATYPATNNPDDILKAQYENQQNLFFTDVHARGEYPSFMNRFFQENDIHIVKEVGDDEILKAHTVDFISFSYYMSLSATASPEGDRSAGNLMGGVKNEYLESSDWGWQIDPKGLRWTLNDLYSRYELPLFIVENGLGAYDTVEEDGKIHDDYRIDYLRKHIEQMKEAIADGVDLMGYTSWGPIDLVSASTSEMSKRYGFIYVDQDDWGKGTLERSRKDSFFWYKKVIETNGEDLD

SEQ ID NO: 687 - protein, 181 aa, Listeria monocytogenes
LITHVIWDMGETLNTVPNTRYDHYPLDTYPEVVLRKDAKETLEKVKQLGFKQAILSNTATSDTEVIKRVLTNFGIIDYFDFIYASNSELQPGKMEKPDKTIFDFTLNELQIDKTEAVMVGNTFESDIIGANRAGIHAIWLQNPEVCLQDERQPLVAPPFVIPVWDLADVPEALLLLKKISS

SEQ ID NO: 688 - protein, 469 aa, Listeria monocytogenes
MESLELEKLVKKVLLEKLAEQKGIPVKTMTKGAKSGVFDTVDEAVQAAVIAQNSYKEKSLEERRNVVKAIREALYPEIESIAARAVAETGMGNVADKILKNTLAIEKTPGVEDLYTEVATGDNGMTLYELSPYGVIGAVAPSTNPTETLICNTIGMLAAGNAVFYSPHPGAKNISLWLIEKLNTIVRESCGVDNLVVTVEKPSIQAAQEMMNHPKVPLLVITGGPGVVLQAMQSGKKVIGAGAGNPPSIVDETANIEKAAADIVDGASFDHNILCIAEKSVVAVDSIADFLMFQMEKNGALHVTNPSDIQKLEKVAVTDKGVTNKKLVGKSASEILKEAGIACDFSPRLIIVETEKTHPFATVELLMPIVPVVRVPNFEEALEVAIELEQGLHHTATMHSQNISRLNKAARDMQTSIFVKNGPSFAGLGFRGEGSTTFTIATPTGEGTTTARHFARRRRCVLTDGFSIR

SEQ ID NO: 689 - protein, 1201 aa, Listeria monocytogenes
LLDVNNFEYMKIGLASPDKIRSWSHGEVKKPETINYRTLKPERDGLFCERIFGPMKDWECSCGKYKRVRYKGVVCDRCGVEVTKSKVRRERMGHIELAAPVSHIWYFKGIPSRMGLVMDMSPRALEEIIYFASYVVTEPGDTPLEKKQLLSEREYRVYREKYGKGFSAGMGAEAIKKILADIDLEKETNDLKEELKSAQGQRRTRAIRRLEVMEAFRNSGNNPSWMVLDVLPVIPPEIRPMVQLEGGRFATSDLNDLYRRVINRNNRLKRLLDLGAPNIIVQNEKRMLQEAVDALIDNGRRGRPVTGPGNRPLKSLSHMLKGKQGRFRQNLLGKRVDYSGRSVIVVGPNLKMYQCGLPKEMALELFKPFVMKELVGRGLAHNIKSAKRKIERMAPEIWDVLEEVIREHPVLLNRAPTLHRLGIQAFEPTLVEGRAIRLHPLVCTAYNADFDGDQMAVHVPLSAEAQAEARILMLAAQNILNPKDGKPVVTPSQDMVLGNYYLTLEREKAVGEGTIFKDINEAQLAYQNGYVHLHSRIAVFAGSIPNERFTDEQRNQLLITTVGKLIFNTILPKSFPYINEPTKFNLEIETPAKYFVDTTTDVRAHIAAQELIDPFKKKILGNIIAEVFKKFHITETSKMLDRMKDLGFKISTKAGMTVGIADILTLEEKHEILEKAHDTVEKITKSFRRGLITDDERYERVIAVWNAAKDEIQGKLILSLDRLNPIFMMQDSGARGNISNFTQLAGMRGLMADPSGRIVELPITSNFREGLTVLEYFISTHGARKGLTDTALKTADSGYLTRRLVDVAQDVIIREDDCGTDRGLTIKAIREGTEIIEPLEERLEGRYSRKTIRHPETKEVIARENDLITEAIATQIVDAGIEEVTIRSAFTCNTKHGVCKKCYGKNLATGTEVEVGEAVGIIAAQSIGEPGTQLTMRTFHTGGVAGDDITQGLPRIQEIFEARNPKGQAIITEVGGEVVSIEEGRDRQQEITIQGTDDRRSYNIPYTARLRVEEGTIVERGEALTEGSVDPKALIRVRDVLSVQEYLLAEVQKVYRMQGVEIGDKHVEVMVRQMLRKIRVMDTGDTNILPGTLMDIHTFTEANREAILSGSQPATGRPVLLGITKASLETDSFLSAASFQETTRVLTDAAIKGKRDELLGLKENVILGKLVPAGTGIGRYRKLKSEVIKETAEVTDEITNI

SEQ ID NO: 690 - protein, 1184 aa, Listeria monocytogenes
LSGHSGHDVKYGRHRTRRSFARISEVLELPNLIEIQTASYQWFLDEGLREMFRDISPIEDFAGNLSLEFIDYDLGEPKYSVEESKNRDANYAAPLRVKLRLINKETGEVKDQEVFMGDFPLMTEMGTFIINGAERVIVSQLVRSPGVYFNGKLDKNGKKGFGSTVIPNRGAWLEYETDAKDVVHVRIDRTRKLPVTVLLRALGFGSDQEIIDLIGDNDYLRNTLEKDNTDNAEKALLEIYERLRPGEPPTVDNARSLLVSRFFDPKRYDLASVGRYKINKKLHLKNRLFNQTLAETLVDPETGEIIASKGDILDRRNLDQIIPNLENGVGFRTLRPTDGVMEDSVLVQSIKIYAPNDEEKEINIIGNAYIEENVKHITPSDIISSISYFFNLLHGVGDTDDIDHLGNRRLRSVGELLQNQFRIGLSRMERVVRERMSIQDMTTITPQQLINIRPVVASIKEFFGSSQLSQFMDQTNPLGELTHKRRLSALGPGGLTRERAGYEVRDVHYSHYGRMCPIETPEGPNIGLINSLSSFAKVNKFGFIETPYRRVDPETNRVTDKIDYLTADEEDNYVVAQANSKLDEQGTFTEEEVMARFRSENLAVEKERIDYMDVSPKQVVSVATACIPFLENDDSNRALMGANMQRQAVPLMHPEAPFVGTGMEHVSAKDSGAAVTAKHDGIVEHVEAREIWVRRVSLVDGKEVTGGIDKYTLRKFVRSNQGTCYNQRPNVAEGDRVVKGEILGNGPSMDSGELALGRNVLVAFMTWDGYNYEDAIIMSERLVKDDVYTSIHIEEFESEARDTKLGPEEMTRDIPNVGEDALRDLDERGIIRVGAEVKDNDLLVGKVTPKGVTELTAEERLLHAIFGEKAREVRDTSLRVPHGGGGIVLDVKIFTREAGDELPPGVNQLVRVYIVQKRKIHEGDKMAGRHGNKGVISRILPEEDMPFMPDGTPVDIMLNPLGVPSRMNIGQVLELHLGMAARALGIHVATPVFDGANEEDVWSTVEEAGMARDAKTILYDGRSGEAFDNRISVGVMYMIKLAHMVDDKLHARSTGPYSLVTQQPLGGKAQFGGQRFGEMEVWALEAYGAAYTLQEILTIKSDDVVGRVKTYEAIVKGESVPEPGVPESFKVLIKELQSLGMDVKMLSADEEEIEMRDMDDDDFTNQNDAFNIVQPENAAAEKTE

SEQ ID NO: 691 - protein, 392 aa, Listeria monocytogenes
MLTLKGKYNEAKVFTDNVDDNTIGQIITLCNQPFAKDSKIRIMPDTHGGKGCVIGTTMTIQDKIVPNLVGVDIGCGLYVVKLKPGKLKMDFDKLDKVIRERVPSGSKTHDKPVDEFDLEGIVAPIHHGWVARSIGTLGGGNHFIEVNQGSDGIYLVIHSGSRVLGKEIAEYHQEVAYKRLDILRKELKLDATAAKKRGNLEMANNLNGEREQVKLDYDLSYVTGVDLKNYLNDMEIAQKFAARNRYVMAQIILKAMKWDKAVVSAFDCVHNYIDIEHNMLRKGATSAQLGEQIIVPLNMREGSILATGKGNADWNYSAPHGAGRMLSRSKAKAQISLESYQAAMKDVWTTSVSKKTIDEAPKAYKSAKQLLADVEDTMEIQEIIKPLYNFKA

SEQ ID NO: 692 - protein, 167 aa, Listeria monocytogenes
MKKFLSILSILVLALLVTACGSDSSDKKSAKKEEKMETVTYIADINGAKLEATFSHVGDNLRKVDQKMVYPLTALGLESGANLDDATKKQLEEQVASQYSAYKESKGASLETKFTDEALELTMSVDLYKADKDSVASLLGGTTDPKNVSLKETVKQFEAQGFKKKES

SEQ ID NO: 693 - protein, 220 aa, Listeria monocytogenes
MFGRKKVSIPEEYQRFNQFSADKERLLCIGAFTTECKHKVETKLDGSNKMLKLYYPKNQAAKVMKYWLPMFGINDGYSAVEVITNWIQANDYSGMIAANTTNKVIRIVTKASQKEGLDETSLVAAANKVKTYGAFDLDRLGYIVRVCYSLDLINEEQAWDFFEELWGAATMHFDDWDEYCVSYLNGEEGLDTNWYSDGVKAYVALRKDAASLLNKYQLKN

SEQ ID NO: 694 - protein, 421 aa, Listeria monocytogenes
MDYDVIVIGGGPSGLMAAISAAEKNKRVLLIEKGPKLGRKLIMSGGGRCNVTNRRPAEEIIKHIPGNGRFLYSAFHAFDNEDIIRFFERLGVALKEEDHGRMFPVSNSARSVAEAMIQRMEKLGVKIYMQTAVKQVDYEDGHVKGVTLKDGQEISASAVIVAVGGKSVPRTGSTGDGYAWAKKAGHTITELYPTEVPITSSEPFIKQKVLQGTSLRDVSLSVLNAKGKPIITHQMDMIFTHFGVSGPAALRCSMFVLRELKKTGAGTVKMRLDLFPNVSAAELSKDVYKLLEENPKKALKNSLSSLLQEKMLLFLLEKADLEETAEYKQVSPKKIEQFIQLLKDFTFEVNGTLDFEKAFVTGGGVSVKEIKPKEMQSKLMEGLFFCGEILDINGYTGGYNITCALVTGHTAGAYAAEVSNA

SEQ ID NO: 695 - protein, 759 aa, Listeria monocytogenes
MTKAWDGFKGTAWQENISVGQFVQDNYTPYDGDESFLEKSTPRTTKLNEKINKLVEEMDAKGGVLDMDNAIVSNVASHKAGYVDQENEVIVGLQTDKPFKLAFMPNGGLRTAEQCLTDNGYSIDQELHDFYVKNRSTANDGIFRAYTDDIKRARHSHIVSGLPDAYSRGRIIGLYQKPALYGVDRLIAEKQQDLKKIAISSDENIRLREEIWLQIKALKDLIVLGNEYGLELGRPAENATEAVQWTYMGYLASIKQANGAASSFGRIPIFLDIYIQRDLEKGIITEFDAQELIEQLTLKLRMVRFARTDGYNELYASNPTFVTTSMAGMGADGRHRVTKTDYRFLHCLDNLGNSAEPNLTVLWDARLPESFKEYCMKMSVKHSSIQYENDKLMQEEGYGDMQCISCCVSPLNPEADKDKGETHNLQYFGARVNVLKCLLGAINGGKDDLHKNQVFDVVEPITTEYLEYEEVLEKFDKSMDWLTDTYVDAMNIIHFMTDKYNYESMQMAFLPSKVTANMGFGICGFANVVDSLSAIKHAKVKTIRDEDGFVYDYEVEGDFPRYGENDDRADDIAVMVLKMFKDKLDSHKLYKDSEATVSVLTITSNVAYSKQCGNSPVHKGPVFDENGKIVKEPEFFSPGANPSNKAKGGFLDNLASLSKLPFHYANDGISLTIQGAPKMFGKTTEEQHHNLVGILDGYFTKGGQHINLNVLNHDEVIEKIKAGIPVILRISGYCLNTKDLNEEQKMELCQRMFHEKLIG

SEQ ID NO: 696 - protein, 335 aa, Listeria monocytogenes
MFYKTKQSLDQLVQNGSTPGISYQIKTNHLEENNIMGLKSVFPEAEILPRTTENIYDIASLTKVIATTTRILQLIEQQRFQLNDPIQVYLPDFQYNNVTILHLLTHSSGLAQNIPNFSMNNREDVMRYVYATPQINTPGTVVTYADANFLLLGYLISKLDGNYEKAIQNNILEPLIMTNTSFHPVNKKQVIPTELDQTRGLIQGEVHDFKAWTAKSGTGHAGLFSTLSDLSKFRDALMLQLGAPILSEKTWQLMQINHTPGLNRSRGLGWDLRGESVLYHTGFTGTFMVLDLKRQASLIVLSNRVHPSRANPNFVDKRDSIVDTFIEEVSNTKEV

SEQ ID NO: 697 - protein, 547 aa, Listeria monocytogenes
MTLKSGFDYMNNPLLNKGTAFSKEERASYQLDGLLPPIIETIEQQAVRIETQIENLETPLHKHRLLTNLYNENRTLYYYVVTKNVTDYLPIIYTPTIGDAVIQYHKDYTAPDEALFVDAFAPEKLSASIKNYAKNNPNIDMIVITDGEGVLGIGDWSVNGVKIAVGKLAVYTVAAGLAPDRVLPVVIDAGTNNETLLNDPLYLGNKRPRLSESEYDAFIASFVNVMKEVFPKAILHWEDFGRANASRILHNYRDKICTFNDDIQGTGAMVVAAVLATIQVSRIPLSEQKIIIFGAGTAGIGIADQLSAQLMRETGLPFEKAKKHFYLVDRKGLVLDNMTDLTTGQKKYAHPSAEWSNVPTDTLENLVEAVHPTMLIGCSGVTGAFKESIVKKMTQYTERPAILPLSNPTKLAEATASDLIQWTDGKALIVTGSPSKPVEYQNTTYEIGQANNALLYPGLGLGALVTRAKYITDDMLAAASMAVAEQISPNKAGAALLPHVRTLRETSRAVAIAVANQAIKENIHQVELTNVIEAIELEMWQPIYKGV

SEQ ID NO: 698 - protein, 227 aa, Listeria monocytogenes
MKKPSVREIIDQNHFDTIYEPIVVVENTQIFGYESLTRLKTDHWNAISDFIEEAEQDGLQKAFELLTLHNAVKRFNKSGDTPLFVNISYDTFLENQEELHDTLLDNGKIVFEFLETSKLPQERMNDLEKQLLLFQKKHETKFAIDDFGSGYADLHRVFAHHSDFVKTDRLLLRDLFESDGKKIFFEQLHNYVKKHHKSLIVEGVETKEQLEFLQEIGIPYAQGYYFH

SEQ ID NO: 699 - protein, 334 aa, Listeria monocytogenes
MKRFILILILLIFIGAGFFIFLRPESKKTVSAPKETTPTSTSVQTYVKENYTAKNGLIMDYKNTEEPHYLAESIGLYMEYLVEVNDSKTFQKQVNHLEKYFIAEDNFIKWEATDSTTTNAIVDDFRITEALYQASEKFSFPSYKKMADKFLTNTKKYSAEQGVPVDFYDFVHKKKADTLHLSYLNIQAMQQINYRDKAYLPIQTINADPFFTEVFQNGQFKFADQKEVNMIDQMLIAIAYYDENGDIEPNFDNFLQTELASKGKIYARYQRETKKPSSENESTAVYAFLTQYFNKTNQAKNGKITKELLEKMDTSNPETTHFFDYINKEITLKK

SEQ ID NO: 700 - protein, 375 aa, Listeria monocytogenes
LFELVNSYIDSLALFLAILFIQGMSFRKIRQYRPNWFQNGSRRLFLSILLGVYYGLAGIYFIYEGAYENNPVIYTNMRILILMVTSVFGGRIPLIFAYLVMLFGRISFDIASPTTSRYVILMTLIFAACLLVTFWKKQRFSRFVALIILNFPAILYYFVNNFDEGRILRGFEIIEYFLLFFVTALLVFYACNYIDKSNLVIQNLTETAMTDSLTNLPNMRFFTQQFGWIFTKSQKRKKSLSLFIIDIDHFKEINDFHGHQAGNTVLAQFSSILKNRTFPPRTMFARIGGEEFAVLLQNVGTEQAALIADFFREEVERAKFPYNPASGKVTVSIGVASASSNFSTTESLFEAADQALYQAKQNGRNQIAVHQGELE

SEQ ID NO: 701 - protein, 378 aa, Listeria monocytogenes
MPNILDSLWNSMALFLSALFFHGMALRSIREKKPAWFQIKFANEFINYALGIYYGLLGVYFIIRGLPGTDSGIYTDMLLNILIVLHLFSSAGPATIALLLIVSGKLFLGDALFANLIYVFLIIGFHFVCMEVAKLRLSSVQKVVLVKLSAIPLMLFYLHQKIHLAYTMNDLPVWILYFLVSFFITFIIVSAAYYIDTSNKLIYDLQQSTILDPLTGLTNFRHFENAFDAAFNHATLKKSNLSVIIIDIDYFKRVNDTYGHLVGNGVLSTFSQMLLKISFPPNTVISRIGGEEFAIILPNINVSETEHLAEKIRRKVEKIDVPIVASGSVITISAGIANYDGRNYPSANELLNAADQALYNAKRNGRNQVHIRETEPVI

SEQ ID NO: 702 - protein, 368 aa, Listeria monocytogenes
MQKVVIIGGGIVGASAAYLLSKENVQVTLIDSDEAGQATRAAAGIICPWLSKRRNKYWYELAKNSAAFYKELAETLEGDTGRDSGYKQVGVLALRQTEEKLAELFNLARERRLDAEVMGEVAKLSEAETKQRFPLVKSGFGSVYVSGAARVNGGLFCETLLYAAKENGVKIKAGRAHFSSDGEVVIDGEKEHYDKLILATGAWLKDLLQDAGFQTDVLAQKGQLLELNFSEFQTDDWPVILPPSAKSIVPFDNGKIIVGATHEKAAGFNTEPTAEGKAEILTEVSQFMEGDLASKVAHVSVGTRPYTPDFTPIIGQLPGFESVFLANGLGASGLTTGPYVGRILADLALGNASDFVLENYEPSKYISR

SEQ ID NO: 703 - protein, 288 aa, Listeria monocytogenes
MLKTLRTKNICFIMLGTAIYAFGLVNFNIANNLGEGGLAGVTLFLLHFFQIDPAYSNLILNIPLFILGWRVLGNRSLIYTGIGTVSLSLFLWIFQRIPYTLDLHSDLLLVALFAGGFSGIGLGLVFRYGGTTGGSDIIAKLLNHTKGISMGRTLFAIDAIVLVASLSYLDVRQVMYTLVAVFIGSRVIDFVQEGAYAARGALIISKDNDAIASHVMLAMNRGVTVLEGRGGFSKKDQDVLYIVVAKNEIIQLKNIVQAIDPHAFVSVSVVHDVMGEGFTLDENKNPIY

SEQ ID NO: 704 - protein, 111 aa, Listeria monocytogenes
MAKTMAEIQKEVDDFIGGFEEGYFSPLAMMARITEETGELAREINHYYGEKPKKTSEPTKTVAEELGDCLFVLTCMANSLDIDMEKAHDTVMAKFKDRDKDRWTKKEEKAK

SEQ ID NO: 705 - protein, 263 aa, Listeria monocytogenes
MRVAVSGFKGRMGHEVVKTVLREADLELVAVLDHEPKEKNINEMVEFSSLDVPVFGNLSEMLEEIKPDCVVDFTTPKVGYSNTKTILEHGVRAVVGTTGFTPEQISELRTIAESKKIGALIAPNFAVGAVLMMQFAQKAAKYFPNVEIIELHHDNKLDAPSGTGVKTAEMMAETREFVKQGAADEVELIEGARGAEYEGMRIHSVRLPGLVAHQEVIFGAEGQGLTIRHDSYDRISFMSGVALSVRKTKELETLIYGLENILD

SEQ ID NO: 706 - protein, 134 aa, Listeria monocytogenes
MHIALIAHDEKKDLMVGFATAYKHLLEPHQLYATGTTGLRIIEATGLTVHRFKSGPLGGDQQIGARISENKMDLVIFLRDPLTAQPHEPDVTALIRLCDVYEIPLATNIGTAEILIRGLGAGFLDWRDLRRNDE

SEQ ID NO: 707 - protein, 393 aa, Listeria monocytogenes
MNDVFLKALPVLQKLTTAGFEAYFVGGSVRDYLLNRTISDVDIATSAFPEEVKEIFQSTYDTGIAHGTVTVRENNEFYEVTTFRTEGTYEDFRRPSEVKFIRSLEEDLQRRDFTMNAIAMDEHFALHDPFSGQEAIKNKAIKAVGKASERFHEDALRMMRGVRFLSQLDFQLDSETEKALESQIGLLQHTSVERITVEWLKMIKGPAIRRAMDLLLKVEMETYLPGLKGEKKALTEFGSWDWGKRTTDDAIWLGLVVTVQPNNVNAFLKAWKLPNKTIQLVSKAYQYALKMKETWLAEELYHAGKAVFSLVNELNIIRGKENNQHKLSQAYEALPIHSKKDLAITGADLLKWSGESAGPWVKETLDKLECGVLCNEINNEKNQIKRWLGYHEE

SEQ ID NO: 708 - protein, 325 aa, Listeria monocytogenes
MKNNREKLLALFTESDGTYLSGQEIADSLGCSRTAVWKQMEALRKEGFEIEAVRNRGYRLSATAEQYTKDALLLGLETKFIGQHLEVHESVNSTQIIAHQQIETSPEGTVIVADEQTAGKGRLLRPWSSKKGEGIWMSVILKPQIPIQKVPQFTFIASLAITEAIENITKLEPKIKWPNDIYIGKRKICGVLTEMQAEAETIHAVIIGMGINVNQQEFPEEIKDKASSLKLELGESVSRKALLQEILTSLEKYYELFLDKGFAPIKLLWETKAIPFGEKLTASTTKGKIHGQVKGISDEGVLLLQDTLGEVHSIYSADILLDNEK

SEQ ID NO: 709 - protein, 157 aa, Listeria monocytogenes
MKKIVLLLALITVVLTVGACSDNKKETEEKANKTEEESATFLTTISTKDFKQKMADKTTGFVYVGRPTCEDCQAFQPILKKELKKRQPDQKMAYYNTDKASEKSRDNMIALLEKMDIDSVPTMVYLKDGKVASTYAATDEPAKLTNWMNKVSGEVSE

SEQ ID NO: 710 - protein, 331 aa, Listeria monocytogenes
VSIYTKTGDKGTTALFDGNRVKKYDDRVETYGSFDELNAEISVAEKFVTSAENKSLLRNVERQLFYVCAELATEHEASLASKIIITENDINQLEKVIDDYTAKLPKVDSFVLPGSSTAGAFLHSARTVARRGERLLVRLSEQTDIRKELLKFVNRLSDFLYILAREEDFRQMLDKATKLIVAKYLEQTGQEKSVTSDLSFSFCEKLMHQVCIVSEEIGVPVTLAIVDAHGNARFNYRMEHALLVSAELATKKAYSAVAMKTSTEKLTEAVQPGAPLYQLETLTNGDIVTFGGGVPIYGKDGAIIGGMGISGGSVEEDIHIAKKALSMIEKG

SEQ ID NO: 711 - protein, 277 aa, Listeria monocytogenes
MKRPVDFFAMKENGEKITMITAYDYPSAKNVEQAEADMILVGDSLGMVVLGYDSTVPVTIDDMIHHTKAVKRGATDTFIVTDMPFMTYHGSVNETIQNARKIIQESGAHAVKLEGAGEVVNKIARLTEAGAPVVAHLGLTPQSVGLTGSYKVRAKSAQEAQELMDNALAVEAAGAIAIVLEAIPRQLAEKVSKALSIPTIGIGAGLETDGQVLVYHDIIGYGISRRAKFVKAYADIDETIEPALASYVKEVKAETFPEVKHSFTMAEEDLKGLYGRE

SEQ ID NO: 712 - protein, 285 aa, Listeria monocytogenes
MLIIRNKQELKEVILKQKQANKTIGFVPTMGFLHEGHMTLVSHARKESDFVVMSVFVNPTQFGPNEDFDAYPRDEAHDAKLAEEGGVDILFVPTVEEIYPTELSTKLHVDKRVSVLDGADREGHFDGVVTVLTKLFHLVSPDNAYFGQKDAQQVAVVSGLVEDYFFPVNLRIIATVREADGLAKSSRNVYLTEKERKEAPVIHEALQLGRKLIESGETNQAKIVQMMTEKINEQTSHELIAYLAIYSYPEFTPVTDWSKGIIIAAAVKYSKARLIDNELINVKRR

SEQ ID NO: 713 - protein, 127 aa, Listeria monocytogenes
MFRTMMNGKIHRATVTEANLNYVGSITIDSAILEAVDMLPNEKVQIVNNNNGARIETYIIPGEPGSGVICLNGAAARHVQVGDVVIIMSYGMFTDEEAKTHEPKIVVLDEKNHIEMILPEEKAHTTL

SEQ ID NO: 714 - protein, 928 aa, Listeria monocytogenes
MKQKRYIVVDLETTGNQASREDRIIQFAACFVESGKRLETYTTFLNPEKPIPAFIQELTGISPKDVKNAPLFEDVAPIIANLLEDTIFVAHNVSFDWTFLEREMTRAGISLGKMKKLDTVELARIMYPGIDSYKLQDLSDEFNLGHDKPHRADSDAEVTADLLLLLLEKLENLPLPVIRQMTTISGSLKSYLPELLFEIEMRKERENKPLNPNFVEHRGIVIRKKEVEKPTYSRADLLEFPETDEAKMALFKKAGAPLYARSGQFEMMNLVFQAMKSGKHALIEAGTGIGKSLGYFLPAIYQAKQAELPVVISTYTNLLQAQLFEKDVPLLTKLTGFKVKASLLKGRDHYLNLFKFEQLLQEVDTQYDVVVTKLKLLVWLTETTTGDIDEVNLSSGGELFWNRMKHTGWFLSEKHDPWLAHDFYKFNIKQAKNADLVIVNHALLLNDHFSGRETLPKYAFAVIDEAHHFADSARMQGSFVLSYRKLKYFLNQLGSLEKYSLLTRLAMAFPEADSLYDLDIAAMKLSDAVEELFVLLKMQLNFARKNLQEVVLVENSEKDAWNDKVYYAAEKVLYLLKESEKNMETLLEQGKLEENELGEAESAFLEEMYAFLLDWKNMAKQLEQMLHKKSPILTIYLQADKNHSISSIRLKAVLMEVEPTLGKEFFAKKESVIMTSATLTVKGKFDYLRKSLGLEEEQIMEKCIPSPFDYKENARVMIPDDMPPIKDTPIERYTAELAKYIRHIAVKTNGRMLVLFTASDMLQKTYYHMKNEKSLEEYVVLAQGVSAGSAARLTKQFQMFDKAILLGTTSFWEGIDIPGEDLSCLVIVRLPFAPMDDPYTKAQISLRKERGENAFQTYSLPEAVLRFKQGFGRLIRRESDRGIVFVFDNRVDTTKFGKAFLESIPSAPILKGKQADLLEEVSEFFKEG

SEQ ID NO: 715 - protein, 194 aa, Listeria monocytogenes
MYLCENENAYRRRNSGNLEIEMSEITLRNRKPKRKIGKWIAIILGIIIVLVVAAFLYFRYAEKPVTNAETEALDRISGQVDLKTTDQFYLYNGPKEVYYVLTGKNSKNKNIIVWVPKKKSDKVYVKFASDGITEQQARDKVTKEKKPKKILHVNLGMEKETPIWEVAYLDKNDKLNYFDINFETGEWYREIENL

SEQ ID NO: 716 - protein, 393 aa, Listeria monocytogenes
MDLPLSKRVKGVAPSPTLAITAKAKQMKQEGIDVIGLGAGEPDFNTPQNIIDAAIESMNKGFTKYTPSSGIIELKQAIVDKLKKDQFLNYETNQIFVGTGAKHVLYSAFQTILDPGDEVIIPVPYWVTYPEQVKLAGGIPVFVETGFDADFKISAADFEKAITKKTKAIVLNSPNNPSGMCYTKEELIAIGEVAEKHQIYILSDEIYEKLYYGNKADLVSIASLSDRLYDLTIVINGVSKAYSMTGWRIGYAAANKEIIAGMSKLADHLTSNPTANAQYAALEAYVGSQEVPEKMYQAFEERMERFYPELNSIPGFKPKKPDGAFYFFIEVKEAAHKKGFQDVDAFVAALLEEAKVAVIPGSGFGMPDYIRLSYATNPDLFQEAINRIKSFMK

SEQ ID NO: 717 - protein, 430 aa, Listeria monocytogenes
VKITINQASEFVGKEVTIGAWLANKRSSGKIAFLQLRDGTGFMQGVVVKAEVGDDIFATAKALTQETSLYVTGTINEDTRSPFGYEMAVSSVEVISESHDYPITPKEHGTEFLMDHRHLWLRSNRQHAIMKIRNEIIRASYEFFNKEGFLKIDPPILTGSAPEGTTELFHTKYFEEDAFLSQSGQLYMEAAAMAFGKVFSFGPTFRAEKSKTRRHLIEFWMIEPEMAFYKLEDSLQVQENYVAFLVKAVLDNCRLELDRLGRDVSHLEKMVAPFPRITYTEAIERLHELGFDDIVWGDDFGAPHETAIADSFEKPVFITHYPKAIKPFYMPEDPENDQVVLCADMIAPEGYGEIIGGSERIHDLETLQARMEDFDLDQEAYSWYLDLARYGSVPHSGFGLGLERTVAWISGTEHVRETIPFPRLLNRLYP

SEQ ID NO: 718 - protein, 87 aa, Listeria monocytogenes
MFMAKITGSVVSTKKEDSLTGKKLMIVQPVDANGEHVRSEEVACDSVGAGIGEYVLVARGNAARSVFAEPNSAIDSAIIAIVDSFDK

SEQ ID NO: 719 - protein, 239 aa, Listeria monocytogenes
MNPKILEKWMAEGQVTLPQVLVKNYATIGLNEIELVLLLQIQSFAAEAEFFPSMEMLTNRTTLPLEETIKTMDSLLKKGVIAIEQSQDNSRMISEQYNLAPLWGKLVALYENKEADSKHEKELEKQTNLYTLFEAEFGRPLSPMEAEMLSAWVEQDRTSPDLIKEALKEAVISQKLNFRYIDRILLNWSKQGVKTTEDAKRVAEEFHQNGRTSQTINQTEVKKSAGSIPLYDWLEKRKG

SEQ ID NO: 720 - protein, 219 aa, Listeria monocytogenes
LLSNKQTVLCIEEMAKMFPAAHCELVHKNTFELLVAVVLSAQCTDVLVNRVTASLFEKYHSPEDYLAVPLEELMEDIRSIGLYRNKAKNIQGLSEKILTEFNGEVPKTHAELESLPGVGRKTANVVLSVGFGVPAIAVDTHVERISKRLGICRWKDSVVEVEETLKRKLPKELWSDAHHYMIFFGRYHCKARNPECPTCPLLYLCREGKKQAKVRGFDG

SEQ ID NO: 721 - protein, 163 aa, Listeria monocytogenes
MAEFKYAVELTHPDFPAPDVILEEYDPESIYVSGLPFWQEQQFFTKGGGVIPWKNETERACRKLAKHMTNLAESMEADLKVHKKPSPVTVRDALGIFLSILFWSNHRPVQLDNLMDQIKTLETKPLNLDERLEYVLKRGNTYLGFRQLNELMLEQRKLIAKRS

SEQ ID NO: 722 - protein, 827 aa, Listeria monocytogenes
MADKPQTRSQYRNKQSGGSKKKSQKRGKRVAANIFKTIFFVGLFLAFFGIAAGATVFYDYAKDAPKLTDSKLRDPLSSKLLDKDGKVFAEVGTERREYIEYKDIPETLKNAILTTEDARFYEHDGIDPIRLGGAVIANLTDGFGAEGASTLSQQIIKMSYLDYTNKTLARKAQEAWLALQLEEKYSKNDILEIYVNKVYMSDRVHGMQTASEHYFGKNVKDLTLAQTALLAGMPQSPNNYNPYEHPEAAKKRRDQVLTNMYTHDKITKEEMTEAQKTPITTGLRSKKDREDKIYKYDSYVTQVLSEIPKEYDVYRDGLTIHTALDRDAQEYTEKMLNTNEIVNFTDDEMQAGIVLQDTKTGRVQAIGGGRKQKVTRGYNYATQVKRSVGSTMKPIADYGPAFEYLDWSTAHILEDEPYTYSGGTPINNWDFGYKGPISVRQALYQSRNIPALKTLQAVGLDKSEEFVNKLGITYDEGQNVESNAIGANSSNPMQMAGAYAAFGNKGIYNKPHTVTKIVLSDGQTEIDTEPQSTVAMKESTAYMVSDVLKDVLSIGTGTSAAVPGVPAAGKTGTTNIPPEFTSKYYYPSGAARDSWFAGYTTNYSIAVWTGYDDKKKYVSASEQKIAQRMFSKLMAHASAGKTTADFKMPSNVVSVPILKGSNPIARAAQGTSSDKVSYELFLSGTAPTKTASTPEDEKKKAEEAAKKKKAEEDKKKTDEEKKKEEEAKKKAEEEAKKKAEEEAKNLTAPAGLRASYNAGSKQINVSWSAVEGATYEVTVNGSTTTVSSTSVSVSGGNPGDTVSINVVAVKDGKRSPASSTTVKIPDS

SEQ ID NO: 723 - protein, 201 aa, Listeria monocytogenes
MAIGYPNGKKYAASHEVLPQQKRKAPVTYGKRGMSLEDDLNDTIAYYLTHEIAVIHKKPTPVQIVSVDYPKRSSAKIKEAYFKTPSTTDYNGVYKGKYVDFEAKETQNTTSFPLSNFHDHQMTHMANVLKQDGIVFVIIAFQKLGETHFIPFEKFYPFWERMQSGGRKSVTIAEIQDVSDQIPYGLNPRLDFLQSIDKLYF

SEQ ID NO: 724 - protein, 591 aa, Listeria monocytogenes
MEKAGIYHQPASSYAYSYDAKTLHIRIRTKRLDISKVTLIAADPYLWKDGKWQSESYTMRKIAETEEHDYWFFAITPEHRRLQYGFLLTDTEGETTFYGGRGFFEPTEANLATMDYYFKFPFIHAVDTFEAPEWVRNTIWYQIFPERFANGNPAISPENTLPWGSKDPNTTDFFGGDIEGIIEHLDYLAELGINGVYLTPVFEAPTNHKYDTIDYKKIDPHFGDKETFRKLVKEAHKRGIRIMLDAVFNHIGDTSPEWQDVVEKEEKSAYRDWFHIHSFPVRQNENGNIEGEPTLSYDTFAFTTHMPKLNTANPEVQKYLLDIATYWIREFDIDGWRLDVANEVDHAFWKEFKKAAQAEKEDIYILGEIWHDSWIWLLGDEFHAVMNYPFTQTIIENFIEEKITPEQMVSGINEQYMRYPNQVNEVMFNMLDSHDTARILTRANNDEDKVKQALAFMFAHTGSPCIYYGTEIGMDGGNDPGCRKCMEWDEAKQNQDMLAFTKQLIALRKDNQAIITSGELTWLEASSETGITAFSKELNGEKLHFLFNQTKKDQDFTISFANTAIDIWNNQAVSDNLTIPAKGFLVIKENS

SEQ ID NO: 725 - protein, 144 aa, Listeria monocytogenes
MSFLDKELVNLHGSAKNADEAIVQAGELLVNAGYVSEQYVEKMVESYHENGAYFVIAPQIAIPHARPTDGVENSAVSLVVLKDGVNFGHAANDPVRLVFGLAATSSEAHLKVIQKIVSLLSNNDNIEKMIHSEDYQAIGELVEG

SEQ ID NO: 726 - protein, 159 aa, Listeria monocytogenes
MIEKLVEIIVQRMKLRATSKTSIAISKLPRDPVAIFMESGTVRLTQVNKHFLERILGGNRAESLTVWFEKAADYGVTIELELYDNGEPWLDYTMLSQLNYPVFTSNGERLFHASNQVVCYGDSAVIPSGSTLCKYKKQLITPLANEYLTKNNIAVRERQ

SEQ ID NO: 727 - protein, 419 aa, Listeria monocytogenes
MKRFKKVGIVSAVLVMALSLAACGGGKDTSKSGSSDEKTLTVSVDAGYKDYVNKIKGDFEKDNDVKVKVVEKDMFETLEALPLDGPAGTAPDVMMSAFDRIGSLGQQGHLAEVKLGNKDDYDEKDQKQVTIDDKIYGAPAIIETLVLYYNKDLLDKAPATFKDLETLSKDSRFAFTSEKGKNTGFLAKWTDFYFSYGLLAGYGGYVFGDEGTNPKDIGLNNKGSVEGITYATKWFQDVWPKGMQDNKSADDFIQDQFVKGKAAAILGGPWSAANYKEAKINYGVAKIPTLNNGKEYSPFAGGKGWVVSNYSKNKDVAQKWLDYVTNQKNQETLYDMTNEVPANLKARDTAKSKNDELTNAVIEQYKNAQPMPNIPEMSEVWTGAENLMFDAASGSKTPQQSADDAVKVIEDNVTQKYTK

SEQ ID NO: 728 - protein, 435 aa, Listeria monocytogenes
MKLEQKQIKNVRQATLLSIIPGLGQFYNKQNFKGIVFFALFALFIIEFFAVGLNALIGLVTLGSVPGVDHSLFLMIEGTLQLIVTLLFIGFWFINIFDARRVAMQWNLGETVNRSALAIIKNMLDKGFPYLLTLPAYLVMTFVIIFPVLVTLFMAFTNYDFYHIPPANLIDWVGFKNFFNIFFLSSYRDTFLSVFSWTLIWTICATSLQIVVGVFTAIVANQSFIKGKRLFGVVFLLPWAVPAFITIMSFSNMFNDSIGAINSQVIPLLNHLPFIDINAIAWKTDPFWTKVALISIQGWLGFPYIYVMVTGVLQAIPGELYEAARIDGASAIQRFRKITLPMILFVTAPVFITQYTFNFNNFSIIYLFNEGGPGSVGAGAGSTDILISWIYKLTTGTSPQYAVAAAVTLLISIIVITVSMIAFKKTNAFGNEEMM

SEQ ID NO: 729 - protein, 283 aa, Listeria monocytogenes
MRDFMKDQRTTKFLTQFFTYLFLTVLTIIILYPILITASSAFKPGNIAAFTLEWSDSWTLNNFTRLFNETLYLDWYKNTLIIAVVTMIMQVTIVTLAGYTYSRYRFKGRKNSLIFFLIIQMVPTMAALTAFYVLAMLLGALDQYWFLTLIYIGGGIPMNTWLMKGYFDTVPRDLDESAKLDGAGHFRIFAQIILPLVRPMIAVQALWAFMGPFGDFLLAKFLLRTPENLTIAVGLQTFIANPQQQKVALFAAGAILAALPICLLFFFLQKNFVSGLTAGGTKG

SEQ ID NO: 730 - protein, 277 aa, Listeria monocytogenes
MKKIPFIIQYVKSTLGPTAIFEGRKVLKFWQMVIVFIFLNALLLLPVSAHFANQSSFDLPSLMPKMATLGTDQLASKISGLTLENGALTDKNAHIVEKTVNGVAGVNLTKAELSGAKNVINFKDQEMTLTDASGYNFEVSYPKDATLSEITSGESLVDWVSAQWYLENQAFVFLSMVLMIGSIIFVSSLMLTVFTTLFIWMTKRSSFSSIASFKESVNLTLNALGIPVIAACIIGFIYFDITIIMAVQSLGMVLMIAWTFLKTRFYKTSEKSMAASR

SEQ ID NO: 731 - protein, 753 aa, Listeria monocytogenes
MAQKQLFEIEPWTLRTTKLDKENKRLQESLTSLGNGYMGMRGNFEEGYSGDGHIGTYYAGVWFPDKTRVGWWKNGYPDYFGKVINGLNFIGIEVRLDGEKLDLFVDEVSDFELELDMEKGVLRRQFTVVKNNKTFRISAERFLSVATKELAVIHYQVEALSSAKVELTSFLDGNVQNEDANYEEMFWQEVEKASSASRGSLVTKTIPNNFGTPRFTVSAVMENKTNAANETNQTKALYTENHFQFDLQENEVAKIEKRVVITTSRDFEEEDILPAGEKILQSLEIKTYEELLTAHVAGWRERWDKADVEVSGDDSAQQGIRFNIFQLFATYYGEDARLNIGPKGFTGEKYGGATYWDTEAFALPMYLSLTDKSVSHNLLKYRHDQLDGAKINAQKIGLDGALYPMVTFTGVECHNEWEITFEEIHRNGAIAYAIYNYTNYTGDDSYLKTDGIEVLTEITRFWADRVHLSDRLDKYMIHGVTGPNEYDNNVSNNWYTNYIAAWTIRYTLENLDAEAKKRLGVTEYEIAKWEDIEHRMYYPFDEKWQIFVQHDTFLDKELRSTDTLKPEDMPINQNWSWDKILRSCFIKQADVLQGLYLFYDDFDFDTKQRNFEFYEPLTVHESSLSPAVHAVLASELGKYDKAVELYKRTARLDLDNINNDTEDGLHITSMAGSWLSIVQGFAGMRVTSGKLSFAPFLPNGWDNYRFKINFRDRLLEVKVEVGQVTVKLCHGEAINLEMYKKNYLLETAVIVEI

SEQ ID NO: 732 - protein, 273 aa, Listeria monocytogenes
MDFSNMSILHYLANIVDILVVWFVIYKVIMLIRGTKAVQLLKGIFIIIAVKLLSGFFGLQTVEWITDQMLTWGFLAIIIIFQPELRRALETLGRGNIFTRYGSRIEREQHHLIESIEKSTQYMAKRRIGALISVARDTGMDDYIETGIPLNAKISSQLLINIFIPNTPLHDGAVIIKGNEIASAASYLPLSDSPFLSKELGTRHRAALGISEVTDSITIVVSEETGGISLTKGGELFRDVSEEELHKILLKELVTVTAKKPSIFSKWKGGKSE

SEQ ID NO: 733 - protein, 452 aa, Listeria monocytogenes
MDRILNNKWSIRIIALLLAAILFTSVNANNNNATTFSTTSSSDSEVIENVPVKVYYDKTNLYISGIPETVTVTLSGPRSIVQSAKAQQDFTVYADLKNASIGTQEVKLQVKDVSDRLKVKVNPATVNVNVQEKVTKKFSVDVELSKSVVADGYQAGTPIIDPKKVSITGAKDTIEQIAYVKATLESDGKHKSEFTDKATVSVFDSNLNKLDVEVNPQEVEVTVPVEKVGKSVPVKIKQEGTPESDIEISSMTPDKSEVVVVGDDAVLEKIKEIEIPIDVSKIKADTVKEVTVPVPTGAKSVQPTTIEVKIKTVKKSEANNNPTTSDSNNQDTDTTDNNTDDSGDNNTKISKSFSNMQVYMSGLKNTFDAQMITPANGKVSVTITGEKKTVDGIAAKDLSVIANLSKSKAGSYSIPLELNGLPDNVAYVINPRQADFIITDKEASIEVPSKST

SEQ ID NO: 734 - protein, 450 aa, Listeria monocytogenes
MGKYFGTDGVRGVANSELTPELAFRLGRMGGYVLTRHVGEHPRVLVARDTRISGEMLESALIAGLVSVGIEVMRLGVISTPGVAYLTKAQGASASVMISASHNPVDDNGIKFFGSDGFKLSDDQEEEIEQLLDTAEDTLPRPSGEGLGTVSDYFEGKQKYIQYLKQTIENDFNGYHIALDCANGATSGLATHLFADLDADISSMGASPNGLNINDGVGSTHPEALAAFVLDKKADVGLAFDGDGDRVIAIDEIGQIVDGDKIMFICAKYLREQGLLNNNTIVSTVMSNLGFYKGLKELEIEDVQTAVGDRYVVEAMREGNYNLGGEQSGHIIFLDHNTTGDGLLSGIQLINVMKATGKKLSELAAEMKTFPQKLENIRVSDKNHVTDNPKVSKVIDEVEAEMAGNGRVLVRPSGTEPLVRVMVEAATKEETDEYCERISAVVRSEMALND

SEQ ID NO: 735 - protein, 153 aa, Listeria monocytogenes
MNWTIWDKSQKVPYTLLLEADPSEKQIAKYLDKSHVFQLMHDDIVIGIICLFPLNNDQLEIMNIAVSSDYRNQGIGKKLLEKAFDYAIHKHFIKIIVKTGNSSIDQLAFYQKNGFRMQHIIPNYFTENYPNQTITENGIVCLDQIILLKEIKS

SEQ ID NO: 736 - protein, 274 aa, Listeria monocytogenes
LPSKWRGICGSLLIALGITQLYSFISAVIGYFNAEENSFVFVWNYWMLLFFGVGLFIIGFAFMRKESFRLASIIGVMCFVLFQGFSVYYYQLRVLSKLEYTQPFEWSGTLLCILGLLVLIALLIGPIFQAKEIQADQAWKTKWRYAAGVFSLLGAVTSVFAAVTIFRQLHSDNIKEGYLFTTALDGYFACFMAVIFLLVVIFSWRKVSYLLVGILMGAAFILLTNYLSVTNWIDFAKENLSITFGSNEREVFGMQFLMGASAFLSSIFGYIAKK

SEQ ID NO: 737 - protein, 646 aa, Listeria monocytogenes
MTLFDLAKKNIRHNFVHYFLYFASMIFSIMIYFTFLVLSKDPSVVARIDQSAKLSTAFSSSSVILLIFVAIFILYSNNFFTRKRKKEIGLYSLLGLRKKEIGRMLFYENFIMGLGALIIGIIAGTLLSKLFVTILLNLINLDSIGGFAFSWAAVIQTSIVFIIITLFTSFTGYRIIYRTTLLDLFHSESKREKSPKPSFILALLSILLIGLGYFIAGQPLDSKGSIWAQLGFSIGALVILASVIIGTALFITFFLPYLLTKLRNNKRIFYKGSNIISTSQLAFRISSNAKTLIIISILSATTLSAIGTISSVYYQANTSASTSAPSSFEYEIPKDSETNNKIIETAESDPDHPVEFKQKSTYYIVKAEGARPDFVEYDINEGFPVISESDYNSLVKEQGTPEKAASLKGNEAQMVLTITYDEDAQKEMVGEKFTLASPNKPNIKIKSVVQNSPISTIPGLLVLPDSQVAKIAADSSIAAHSVESISVKDAKQAQALDKKMRAVIPKDTNFISYTKMYQEIITVTGVLLFIGMFIGFVFLAATGSIIYFKQLTEAYNDIGTFDILKKIGLTRRDIRKVLAKQLLVVFLIPLIIGIAHSSFALLGLSHMLALDLTLPVVISTGVYTLMYIVYYFVTLNSYTNIVFGKK

SEQ ID NO: 738 - protein, 255 aa, Listeria monocytogenes
METVLQAKNVRKIYGSKGNVYTALENISIDIKEGEFTGIMGPSGAGKSTLLNVLSTIDKPTSGQIVISGQELENMNEQQMSTFRRDKLGFIFQDYNLLDTLTIRENIILPLALAKRPVKEMEEKLAIISEKFGITEILDKYPSEISGGQKQRTAASRAIITSPSLIFADEPTGALDSKSATNLLESLRDLNEQDKSTIMMVTHDAFAASFCKRILFIKDGELYTEIYRGTKTRKEFFQKILDVLAKLGGDSDDVI

SEQ ID NO: 739 - protein, 251 aa, Listeria monocytogenes
MNEAVKTLDGWFCLHDFRSIDWAAWRELNPGNQELMLNELSHFLSDMEITKNIGEGEHTIYSILGQKADLVFFTLRDSLEALNEVENRFNKLAIADYLLPTYSYISVVELSNYLASHMAGGDDPYQNKGVRARLYPALPPKKHICFYPMSKKRDGADNWYMLPMEERQQLIRDHGLIGRSYAGKVQQIIGGSIGFDDYEWGVTLFSDDALEFKRIVTEMRFDEASARYAEFGSFFIGNLLLSEQLSKLFTI

SEQ ID NO: 740 - protein, 243 aa, Listeria monocytogenes
MNDVLTLLRNHRSFRKYKKGVEIPEEKLDAIIRAAQAAPSWINGQHYSIIAIKDQERKNKMAELCGNQPYIAECSVFLCFVADFHRVKVASDMHGKSFQIAGEEDLLMVAATDIGLCMQNALTAAESLDYGTICIGGLRRNITATAGFLNLPEFVMPVVGLCIGVPDVEAPVKPRLPKEAVYFEETYQTDVMPLLEAYDQEIIPFSEREGFVSYTERLAKFYDRPYYPNLTEQIKERGFLGGK

SEQ ID NO: 741 - protein, 279 aa, Listeria monocytogenes
MDILQTANERMEQLAALMNKDIEQKIPAGEKVKVGVDLGTSSIVFVVLDENNVPLFGAFEFADAVRDGLVVNYRESVEVVTRLKNRAEKCLGISLTHASGAIPPGTVGNNKKVVANVIESAGMEALYTIDEPTAAAAVLDLQNGAVVDVGGGTTGISVFENGEVIYTADEPTGGTHMTLVLAGYYGVPVEEAEQNKRAQKDSSEHFSVMRPVVEKMAEITRVHLEKSPSEPLYIVGGASAYSQFKDTFESYLKMPVFQPNYPQYVTPLGIAMSSGSENL

SEQ ID NO: 742 - protein, 318 aa, Listeria monocytogenes
MTEALFLNPVFQDRIWGGTKLHDYFGYDIPSNTTGEDWAISAHPNGPSVIKNGEYKGKTLAELWQENPALFGNPKEAVFPLLTKILDANTDLSVQVHPNDEYAKVHENGELGKTECWYIIDCAPGAELIYGHKAASREEFATWAKNGEWDKLLRKVAIKPGEFYYVPSGTIHALGTGTLVLETQQSSDTTYRVYDYDRKDAEGNLRELHLDKAIDVTTAPHVDAKLDIHTETRGGLTETTFVSNDFFSVYKWDVDGKAEFVAKAPYTLVSILDGEAVLTIDGDEQAIKKGDHFVLPNEVKSWEITGQITAIVSTPPVK

SEQ ID NO: 743 - protein, 265 aa, Listeria monocytogenes
MPLFKHEGIDFNYEIQGEGIPFLFLHGLGDNLKFAFETFNNDEKIQLISLDQRGHGKSGHDSRKLSYERLASDALALMDYLGIQRFYIGGLSMGAGVAVNLAVHAENKVMGLILLRSSATDEPMKKEVIEWFSTVSMYLPKKNGSQLFEQDPIFPSIKDTYPKAIDTFKRYFEDDASVNYYKKFIDIPRDRPIKCKSELTNLTIPTLILANNYDVIHPIEYSLFYARNMKKASYYELTPKTVDAEKHKIEIDTYINTFILSNSKK

SEQ ID NO: 744 - protein, 377 aa, Listeria monocytogenes
MAVIKNVKIYKENELIDAVVITEGNLIKEVCSTTPEKYSDEPTFDGNGRLLIPGMIDVHIHGAKNYDMMDGSTESIQAVSMACAETGCTSFLVTSVSSSLEDLIQMIRQTKKVIGKEKGAKIAGIHLEGPYLNIEKKGMQNPAHLRHPDLKEMKKIFDEADGLIKMVTIAPELPGGIELIDFLKKRGVVVAIAHSNATYEEAQDAFEKGASHITHCFNAMPAIHHRAPGLVAAALENDSISVQAIVDGVHLHPGIVRLIHKIKGPDKMVLTTDALQAMGVGDGEYIFGGHQVTVTEGVARLQDGTLASSTVTMNKSLRLSNEFGINLQDTIQMATSTPADILGMKNLGRIEKGYSADLVLLDKKFEVLSTWINGEKY

SEQ ID NO: 745 - protein, 253 aa, Listeria monocytogenes
MNQKERIVEELKLLENMKTISQEELMQIFSISKDTARRDILKLVESGLAERYPGGVSLPVLKPQIESYTSRLVKQSEQKQKIAYVAGKVIKDHMTIYLDVSTTVHFLASGLEQNDLVVVTNSMDNAIAASQKEDNKVYLLGGFFNFQSRVLSGEPVLGQLQQFNFDVAFIGGAGLTEEGVFYSELTDVYMKQEIIRNSEKVYLLVDSTKVNKKTAFKIDFSGIDAVITDEPLPKDLMQHLISKEVEVISLKGL

SEQ ID NO: 746 - protein, 284 aa, Listeria monocytogenes
MSLKMKWIIAISIIIVLLVVGWFLGTRLTVKKYEVSSTKIEKEIKLVQLSDLHFSEFGDKNEKLLHKVENLNPDVIAITGDLFDRQGDSVPKELIKKLTKIAPVYFSPGNHEYDVKNAYEDDYKPFLEKMGVVNLEDKTATIDVGGQKFQMSGLRSSANLDYDYSYYKKGLAEIQTQQDSQYYQVLLSHMPDYFKLYVENDFDLTLSGHTHGGIVRIPYTNIGAIAPGPQRTILPEYVYGEHSKNGKTMIISAGLGAGSLHQKAFPRLGNPYEIVAVTIKPELK

SEQ ID NO: 747 - protein, 664 aa, Listeria monocytogenes
MSQNTYCLLGNPNTGKTSLFNALTGSYEYVGNWSGVTVEKKVGTLRSKTGKLIDLPGIYDLNPISRDETVVTRFLLEEKFDCMLNIVDSSQIERNLNLTIQLLEFGAPVVMGLNMIDVAAGRGIHLNIQNLAKKLRIPILPVVARSGKGTDDILTTLSEKHVAPAIPLVLPYGEPAEKAIAEIQALTKDIIPTKQSRWLAVQFLSKNEVTEEFLTTSPMFEQLKDIRSDLEIALAGKLENHFHQVRVNYIHDICLTSVEYTRNSDIPLSDKLDKIFTHKFFGIPIFLGIMWLIFQITFTWVGAPLSDLLDGFIGGSLTDWVTSFLTTIGASGFITDLVADGIIAGVGGVLVFVPQILVIFFFISVLEDSGYMARIAVVMDRVMEIFGLNGKAFIPMIIGFGCNVPGIMAARSIEESKERTLTILVSPFMSCSARLPVYALFVGVFFEKYQALVVLSLYVIGILMALIVTKILSKTLLKKDNSVFVVELPPYRLPSLKTLWRSTWEKGKGFLRKAGTFIFAGSVIIWLLNYAGPSGLDVPMGESFLAIIGGMLAPLLVPLGFGTWQAGATLIPGFLAKEVVVSTMAIIYAVGESSMGSIVSTFYTPLSAYCFMLFILLYIPCLATVAAIRKETSSWKWTAFAVAYPLITAYVLVFLVYQIGSLFV

SEQ ID NO: 748 - protein, 325 aa, Listeria monocytogenes
MSDLFTTIKGQVTGKNVRIVLPEGTDERIVGAAARLQKENIVKPILLGNKAEIEAKAKEIGVSVEGIAIHEPATDPLFDELVAAFVERRKGKATEEAARKMLVDPNYFGTMLVYTGKAEGLVSGAAHSTGDTVRPALQIIKTKPGVSKVAGAMIMVRGEERYLFSDVAINIAPVAADLAENAIVSAETAEIFGIDPRVAMLSFSTKGSAKSDETEKVVEATALAKEKAPELTLDGEFQFDAAFVPTVAEKKAPGSVIKGDANVFIFPSLEAGNIGYKIAQRLGNFEAVGPILQGLNAPVNDLSRGCNTDDVYNLTLITAAQAVNK

SEQ ID NO: 749 - protein, 188 aa, Listeria monocytogenes
MKKIGVLAIQGAVDEHIQMIESAGALAFKVKHSNDLAGLDGLVLPGGESTTMRKIMKRYDLMEPVKAFASKGKAIFGTCAGLVLLSKEIEGGEESLGLIEATAIRNGFGRQKESFEAELNVEAFGEPAFEAIFIRAPYLIEPSNEVAVLATVENRIVAAKQANILVTAFHPELTNDNRWMNYFLEKMV

SEQ ID NO: 750 - protein, 295 aa, Listeria monocytogenes
MEKKVGTDRVKRGMAQMQKGGVIMDVVNAEQAKIAEEAGAVAVMALERVPSDIRAAGGVARMADPRIVEEVMKAVSIPVMAKARIGHITEARVLEAMGVDYIDESEVLTPADDEFHLLKSDFTVPFVCGCRDIGEALRRIGEGAAMLRTKGEPGTGNIVEAVRHMRQVNGQIRQIAGMTDDELMVAAKNFGAPYELIKEIKTLGKLPVVNFAAGGVATPADAALMMELGADGVFVGSGIFKSDNPAKFASAIVQATTYYTDYELIGKLSKELGSPMKGIEMSRLNPEDRMQDRSF

SEQ ID NO: 751 - protein, 319 aa, Listeria monocytogenes
MKRIAILTSGGDAPGMNAATRAVVRKAIYEGLEVYGINYGFLGLVNGDIRKLELGSVGDLLHRGGTFLYSARYPEFATEEGQLKGIEQLKKHQIDGLVVIGGDGSYHGAEALTKRGFPTIGIPGTIDNDISGTDFTIGFDTALNTVLDALDKIRDTATSHERTFIIEVMGRDAGDIALWSGLAGGAEAIIVPEESFNMDDVVDRLNKGRERGKKHSIIVVAEGVMSGNEFAKQLAEYGDYHARVTVLGHVQRGGSPTAFDRVLASRLGARSVELLLENRGGLAVGIRENRIVENDISEILKEKHTLDQKLFDLASILSI

SEQ ID NO: 752 - protein, 318 aa, Listeria monocytogenes
MANEMEFEKPILELKSKIADLKEYNETSDVDLTNEIEKLEKRLAKLESSIYSNMTAWDKFQVARHPERPTTLDYISLLFEDFMELHGDRTFGDDAAIVGGIATFKGIPVTVIGHQRGKDTKDNLHRNFGMPHPEGFRKALRLMKQADKFGRPIICFIDTKGAYPGRAAEERGQSEAIARNLYEMSDMKVPIISIVIGEGGSGGALALGVGNQIFMLENAVFSVISPEGAAAILWKDASLAKKAAESMRITAGDLFELGITDGIIPEVKGGAHRDLTAQAEEINKTITKSLHALMAFSEEQLIKQRYEKFKKIGVYETI

SEQ ID NO: 753 - protein, 294 aa, Listeria monocytogenes
LLGDLFTKPKKRKYATIPSDGTKADVPEGIMTKCPECKKIMYTKELQKNLMVCNYCGFHHPIGAKARIDMLVDEGSFEEIDASLTTANPLGFEDYMDRIEKDKQKSGLNEAIVTGHATIGGNPLVIAVMDSRFRMASMGSVVGEKILRAVEDADKTNKPFVIFTASGGARMQEGMLSLMQMAKTSAAFKRFSNHGGLIITVMTHPTTGGVSASFASLGDYNFAEPGALIGFAGRRVIEQTVREELPEDFQTAEFLLKHGQLDDCISRLDLQNKLSFILSIHVKAPGVGGEVDGE

SEQ ID NO: 754 - protein, 1108 aa, Listeria monocytogenes
VGFVHLQVASAYDLLSSTASIDKLIAKAKEYHYPALAITDKNVLYGVVEFYQKCLAADIKPIIGMTVTIQGYLNPINSYELILIAESTAGYHQLLKIASAIQTREEGPELPQSWLRAYSSDLIVISPGAKGEIERLLMEEDREGALEVYANLVEIFGKESVYLSAQKENPRLFAKIETFSSEENVPVVATKNVQYLEPKDAQAKEVLTAIRDNRTVDWTTLPLAGPNYFTSQDEMERDWQTAFEKQACLETGELANRCHVEIALDQHLLPRFPLNEGQNASDVLRQTAFAGLKERNLLGMEYQERLEYELKVITEMGFADYFLIVWDVIRYSREAGVLTGPGRGSAAGSLVSYALRITDVDPIRYNLLFERFLNPERITMPDIDLDFPDNRRDEVISYVVSKYGEAHVAQIGTFGTLAAKAAIRDTARSFGLNSVLLSEWSKLIPSQLGITLQKALQESPRLENHIKSSKENEMIWEVACQLEGLPRHISTHAAGIVISDKPLVEQVALQLGSGDARLTQFAMGELEKIGLLKMDFLGLRNLSLLDRVLKSVNYTRETPLTLADISLEDKKTLKLFQTGDTTGVFQFESDGIRRVLRKLKPTSFEDVVAVDALYRPGPMEQIDTFIARKHGKEKIQYPHPDLASILEVTYGVIVYQEQIIQVANQMAGFSLGEADLLRRAVSKKKADVLNEERIHFVEGAKSKGYSEASANQVYDMIVQFANYGFNRSHAAAYSKIAFQLAYLKAHFPAAFMSSLLSSVFGNDDKISQYITEAKNYGISMLAPSINHSNYYFQMENETSIRYSFRVIRKVPTKFILEIINERKKAPFRDFFDFCERMPHKMLSETVLEALVFSGCFDEFGEDRATILATIDAVLQYISLLGEDSKGMNLFAEDDEFLKKMKPRYRKTAPISIDEKLEKEKLYTGQYVSAHPVSYYQNKLQNLAITRLANLSSGKNYQVAAYVHEVKSIRTKKGETMCFLTISDDSKELSAVMFPECYRKFANFAQKGEILFLQVKADTRNGELQLIINKAEDLKEIKAPVRLFLKLTEPQQMEQIKPILARYKGDSKVIVHQAITKQTAELKNIQVTPSNELQEALGELLGKENVVIK

SEQ ID NO: 755 - protein, 311 aa, Listeria monocytogenes
MKNEILQQIKQYETIILHRHVRPDPDAYGSQMGLAEIIRASFPEKKVYSVGNDEKSLQFLGIVDEITDETYKDALVIVCDTANQERISDGRFNLGKALIKIDHHPNDDAYGDLLWVDTTASSCSEMIVAFWEMFSDELILNETAARLLYAGIVGDTGRFLYPSTTEETLRLSAHLVTFPFDRPALYRELYELPKNTVKLSGYILQNFVMDENGAATVYLSDTLLNEFEVDPRDASALVSCIENVAGIKAWIMFIQEGPVFRARLRSKGPVINELAKEYGGGGHPLASGATLHNEEEIKEMTAKLQLICAAK

SEQ ID NO: 756 - protein, 437 aa, Listeria monocytogenes
VATKHEQILKYIENLAVGEKISVRKIAKNLSVSEGTAYRAIKDAEIIGFVSTIKRVGTLRIERKQKDSIEKLTFAEIVNMIDGQVLGGRAGLYKSLNKFVIGAMTVEAMERYTDAGNLLIVGNRVSAHELALKRGAAVLITGGFDTDDEVKQLADEKELPILSTSYDTFTVATMINRAIYDQLIKKEVVFVEDILTPLETTAFLSTSDKVEDWHKMEEATGHSRFPVVNRAMRLTGMVTSKDILEKNPSISIERVMTKNPLTVGPKMSVASVAHMMIWESIEVIPVVKDDLTLIGIVSRQDILKSMQMIQKQPQVGETIDDTIANQLSEKTDTGEEADYEFKVSPQMTNSLGTLSYGVFTQVVCEVVQQKLFSMKKRNVAIENVTMYFLKPVQMDATIIIKPRILEMGRKAGKLDVELYLEGILTGKAIVACQMMER

SEQ ID NO: 757 - protein, 228 aa, Listeria monocytogenes
MKISFHGQSCIKIITGDTTILVDPFISGNEKCDLKAEEQMPDFIVLSHGHDDHVGDTVEIAKNSGATVICNADLASFLAVEDGLENMAPMHIGGKRQFSFGQVKLTQAFHGSQTVRDGRIVNLGFPTGIVFTIEDKNIYFAGDTGLFSDMKLIGELNPLDVAFLPIGDNFTMGPEDAAIAARFLQAKLVVPMHYNTFPLIAQDPHKFVASLNEGIAGKVLEIGEGIEI

SEQ ID NO: 758 - protein, 365 aa, Listeria monocytogenes
MEKNIDVLQNWLKDQGAEVGFLTDPENIAYFSGYHSEPHERVLGLAVFSDSEPFLFTPALEVEDVRGGDWTHPAYGYNDTENPFTIIADEIKKRVANPSKFAIEKKHMSVDRYEQLGGLFSGSSFIPIEHKIEQIRLIKTEAELKILKEAALLADYAVQVGVDEIAEGKTEAEIVAKIEYEMKKKGVTAMSFDTMVLTGKNGALPHGTPGETKIKKGDLVLFDLGVVHKGYCSDITRTVAFGDISDEQKKIYDTVLEAQIAAVEKVKAGVKASEIDLTARNIIREAGFGDYFPHRLGHGLGASVHEFPSITETNSMELQENMVFTIEPGIYVPGVAGVRIEDDLVVTKDGVQVLTEFPKTLQVIE

SEQ ID NO: 759 - protein, 370 aa, Listeria monocytogenes
MLVGVPKEIKNNENRVAMTPASVFSYVNAGHTVYVEKDAGIGSNYQDADFVQAGAKIVETAKEAWDVDMVVKVKEPIASEYTYFKEGLLLFTYLHLANEPTLAKALMESKVNSVAYETVELADHTLPLLSPMSEVAGRMAAQIGAQFLQRTNGGMGVLLGGVPGVERSEVVIIGGGIAGTNAAKIAAGLGANVTILDMNLKRLRELDDIFGNQVQTLMSNDFNIETAVKKADLVIGAVLIPGAKAPKLVKEHVVKQMIPGSVLVDIAIDQGGIFETTDHVSTHDNPTYEKYGVLHYAVANMPGAVPRTSTLALTNATLPFGLKLANQGLEAAVQNDPFLLRGLNTYQGHITYKAVADSLDLPYTDSKELI

SEQ ID NO: 760 - protein, 154 aa, Listeria monocytogenes
MLQQYERVLVAVDGSKEAERAFQKAIQVANRNDAALGLVHVIDTRAFSSVANYDTSMADKATEYADELLSGYKEDALKAGVTKVESYIEYGSPKTAITKEAAKAFQADLIMCGATGLNAVERLLIGSVSEYIIRHSPCDVLVVRNEVPDYKDEK

SEQ ID NO: 761 - protein, 211 aa, Listeria monocytogenes
VEREELKAIIKQIVADKLSGAETEIPIGVSNRHIHLTETDYNQLFPNEPIQVKKWLKQPGEFAAEQTLTVVSEKGELHRVRILGPLRKFSQVELSKTDARMLGMKIPIRVSGDIEGTPGIKLVSKHSEICLPKGAIVAKRHIHLPESVANEFGVKQGDEVSVLVGSEMRSLVLNHCTIRVNNQFIPEMHIDTDEANAADIAGTNFAKIIKS

SEQ ID NO: 762 - protein, 397 aa, Listeria monocytogenes
MEKTIAINAGSSSLKFQLYDMPSERVITAGIVERIGLKDSIFTITVDGEKIKEIIDIPDHEIAVQMLLEKLINHKVIGSYDEITGIGHRVVHGGERFPESVYIDDQVIKDIEALSELAPLHNPANVTGIKAFRKILPDVVSVAVFDTAFHQTMPPASYLYSLPYSYYEDYGIRKYGFHGTSHKYVSERAAELLGRPVEELRLLTCHLGNGASIAAIEGGKSMDTSMGFTPLAGVSMGTRSGNIDPALIPFIMEKTGKTAEQVLDVLNKESGMLGVSGISSDLRDLEDEAAKGNDRAELALQVFVDRIHKYIGSYAARMNGVDAIIFTAGIGENSSYIREKVLRGLEFMGVYWDPALNQVRGEERFLNYPHSPVKVIIIPTNEELMIARDVETIKNNR

SEQ ID NO: 763 - protein, 332 aa, Listeria monocytogenes
LANEATQELFQVLDNTAIILQNELEISYLEAVYETGENLFQKEVLQKEELSSEKQLKLQESYESIELENFSNEEIRKGLQLALLKGMKHGIQVNHQMTPDSIGFIVAYLLEKVIQKKKNISILDPACGTANLLTTVINQLELKGDVDVHASGVDVDDLLISLALVGADLQRQKMTLLHQDGLANLLVDPVDVVISDLPVGYYPDDENAKTFELCREEGHSFAHFLFIEQGMRYTKPGGYLFFLVPDAMFGTSDFAKVDKFIKKNGHIEGIIKLPETLFKSEQARKSILILRKADVNVKPPKEVLLANLSSLTDPSVTAPILAEIENWFKSKQ

SEQ ID NO: 764 - protein, 165 aa, Listeria monocytogenes
MTQVTFKHNPVTLVGTERKVGDKAPNFTVVNRDLEEVTLHDYDGKVRLISVVPSIDTSVCSTQTRKFNEEASNLDNTVVLTISVDLPFAQKKWCAAEGLPNAITLSDHRDLSFGEAYGVIMKELRLLARSVFVVNAVGEIVYTEVVPEGSDHPNYEAAIEAAKKA

SEQ ID NO: 765 - protein, 178 aa, Listeria monocytogenes
MANENVTFESKRQVYHYEPSIPKEEAIPKQYFAGFWIRFLAYLVDLVAIAALKGIIVNPIFRVSGMGMDDGFFTFYWSITTIIFLAYFILLTRFFGQTLGKMLFGLRVVKLDGEKLTWLTVLFREGAMRFVLKTIWPLYVVCAFTPNKQGIADFFESTSVVHMGYLELDEKWANGAKK

SEQ ID NO: 766 - protein, 337 aa, Listeria monocytogenes
MNAKRWIALGIVFALLIVSALAKFTSSQIASKEESSPTFVESLFADTGELTETVIEEGGNDTIAVLSVDGTIQDTGDSGSLFSEAGYNHSFFMQQLEQVRNDDNIQGVLLYVNSPGGGVMESAQIRDKILQIQKERNIPFYVSMGSMAASGGYYISAPADKIFASKETLTGSLGVIMQGYDYSELMKKLGVSDNTIKSGEYKDIMSGTRPMTEDEKKIMQSMIDDSYNEFVKVVAQGRGMTVEQVRKIADGRIYDGRQAKENGLIDEFGYQEDALEALKKEQGLAGATVIQYDAPGDFSSLFSVAAQKISGQNADISQLIKLTGTLKAPRMMYLYGE

SEQ ID NO: 767 - protein, 267 aa, Listeria monocytogenes
MAKTIFYFSYRKTEELHAKAKELKKITTDYGYELTDDYQKANVIISIGGDGAFLKSVRETGFRQDCLYAGIALTEQLGQYCDFHINQLDEIIKAAIEDRWLVRRYPTIYGTVNNTKAFYVLNEFNIRSSIIRTLTMDLYINDSHFETFRGDGMVISTPTGSTAYNKSVNGSIVDPLLPSMQVSELASINNNKFRTLGSSFILSPKRKLRIEIASEEGNNEFPMIGMDSEALSIQHVHEVNLEVGDRFINIIKLPKNSFWDKVKRNFL

SEQ ID NO: 768 - protein, 314 aa, Listeria monocytogenes
MYAKNNTSGKDMLSLLEWNKEELTDIIKLAVAMKTNPAHYSHILSGKILGMIFDKPSTRTRVSFEAGILQLGGQAIVMSSKELQIGRGEPIKDTAHVMSEYIDAIMIRTFSHEKVEELAYHAEIPIINGLTDLHHPCQALADLMTIYEWKDQLEGIKLAYIGDGNNVCHSLLLAGAMVGIDIRLAMPKGYEVDETILAKAENLAKQSGGKIFVTEDSKLAVTDADFIYTDVWTSMGQEDENAKRLADFGEKYQVNAELVSGAKPDYHFLHCLPAHREEEVTTEIIDGIHSVIYQQAGNRLHAQKALLAAILEAK

SEQ ID NO: 769 - protein, 386 aa, Listeria monocytogenes
MKHVFPTYKRFPIDLVNGTGTVVTDKNGKTYLDFTSGIAVCNLGHCPTNVAEAVQQQLGNIWHTSNLYECALQDSVAELIADGKERLVFFCNSGTESNEAALKLARKYTGKEKIITFEKSFHGRTFGSMSATGQAKIHQGFGELVPGFTYVPYNDIEAFRAEIDENTAAVMLEVIQAEGGVIPANAAFLLEVQLLCKKMGALLIIDEVQTGLGRTGTLYGFEQIGLDPDIFTLAKGLGNGLPIGAMVGKSDLISAFGPGSHGSTFGGNKLALAAAKEILLTMKQTGFLEEVNAKADYFRNLLEANLEVLDNVSDIRGGGFLIGIELENAAEPVITELRDKGLLILTAGTNVLRILPPLTVSYAEIDQAIYLLKSVLENQLIGSEEG

SEQ ID NO: 770 - protein, 250 aa, Listeria monocytogenes
VENTIVIKLGGVASDNLTEGFFRQITEWQAANKKIVLVHGGGHYITKMMEALAIPVETKNGLRVTNKATLEVTKMVLIGQVQPAITTAFQKRNISVIGLNASDTGLLEADRLSDTDLGLVGKITKVKTNLIEQLLSENIITVIAPLGINSEHDWLNVNADTAACEVASALHAEALYLLTDVPGVKNGSEIIGEIATAEIEKLQSTGVIKGGMIPKLASAAFAAENGVGQVIITDSLNNSGTKIKNKVAIG

SEQ ID NO: 771 - protein, 398 aa, Listeria monocytogenes
MELIKGNIASPKGFYADGKHAGLKRKRNDIGWIYSEVPANAAAVYTMNQMQAAPIFVTKDSFQSNAKLQAIIVNSGNANACTGNQGMLDALAMRAQTAEKLEIPLDSVAVASTGIIGDMLPMDKINAGIEMLEKQTGNAADFEEAILTTDTFQKQISFQTEIGGRKVTMSGVAKGSGMIHPNMATMLAFITTDAAIPAELLQKLLKIKVDKTFNQITVDGDTSTNDMVVVMANGCAENPMLQEGTADFAKFADMFQAVTEHLAKSIARDGEGATKLIEVQVNGATKTEDARMIAKKIVSSSLVKTAAFGGDGNWGRIICAIGYSGGRFAPDNITIKIGGIEILNHSSQTIYNQQALDAYLEEEHIIIEVDLHIGLESGTAWGCDLSYEYVKINACYRT

SEQ ID NO: 772 - protein, 343 aa, Listeria monocytogenes
MKVSIIGATGYGGLELIRLLHQHSSVDIATLHSFSAQAETLATFYPHLKDLAVSPLEKINPTEIIEKSDTVFIATPSGIAKDIALPYVDAGLNVIDLSGDFRLKDRQLYEKWYGKSAAPTEYIGKAEYGLAEFREKKETTFIANPGCYATATLLGLAPLATNKLIDPTSIIVDAKSGISGAGKVPSASTHFTETNENMTLYKMNSHQHIPEIMQQLTKWDESIPAIQFSTSLIPITRGIFTTIYVKPKNPITQKELHKLYESTYDNAPFVRIQPENVYPTVKQVTASNYCDIGLAYNEKTNVITIVSVIDNLVKGAAGQAIQNLNIMANFAESDGLRFIPVYP

SEQ ID NO: 773 - protein, 403 aa, Listeria monocytogenes
LEFDRMLIRYGELSTKGKNRKQFVTKLAQNVKRAMTDLPEVRIHGERDRMYIILNGADYQLAEERLKPIFGIQSFSPAVRVNLDVEEVKAAALALVQDAHEENGTFKVAARRSHREFPLDSNEINQEIGAYVLQNMEDLTVNVKNPDVKLTIDVRKEGVFLSCRTILGAAGLPVGSSGRAMLMLSGGIDSPVAGYLAQKRGVEIEAVHFHSPPYTSEQAKQKAIDLAAKLAKYSGQVQMHIVPFTEIQEVIKQQIPESVIMTVTRRMMLRITDELRRKRNGLAIVNGESLGQVASQTLESMLAINAVTATPIIRPVVSMDKNEIIQIAQKIDTYNLSVQPFEDCCTIFTPPSPKTKPKLDKIEHYESFTDFDALIAKALDNIETISVNVAETAQVKDEFADLF

SEQ ID NO: 774 - protein, 379 aa, Listeria monocytogenes
MIYFDNSATTKPNAAVLETYTKVASNYFANPSSLHRFGAKSKELLDASRKQIAAMMSALPEEIIFTSGGTEGNNLAIKGLVYSYQNRGKHIITSSIEHPSVRVVMEELEQEGFTVKYLPVDKNGVIKLEELKAALTDETILVSIMGVNNEVGSIQPLQEIGEMLSVLENTFFHVDFVQAIGKIPLTLDANSIDLLTFSGHKFHALRGTGILFKRKNVHLHPEILGGGQEMGYRSGTENLAGNVALAKALRLTLENEPRKEALIEIRDYLLTKIAQMSDMTVHTKQSVAAPHIVCFSAKGHRGEILVHALEKEDIYISTTSACSSKQKLASSTLKAMGVTDEEATGAVRVSLSYENRLSEAKIFIQKLQEIIENLNKVVK

SEQ ID NO: 775 - protein, 571 aa, Listeria monocytogenes
MYYMLIGFIIVVIAVIGAGYILKRKHYQRINELEEKKIKLRERPVIDELSKVKKLKLTGQTEALFESWRSSWDEIETRLFPDLEEVLLEAEMNTDRYKFRSATHAENDIEQMLVVIEKQMDQILGGLKELLISEEKNAKESRATKEKFAELRREVLTRGFKLGETLPYIETKLSELSESLNSYDSLTDQGDHLEAREIVIVVQKEMQVIEAQMERIPSLLHETDTILPEEMTKLRAGYEEMVRKGYYLAQMELDKEISRMKNQIDKMKKNVINLDLDEAEQGVEELHNEIDLFYDTLEHEAEARHFVKENHSPTSDKLQRQNAVSDALAEQITEVKQTYHVAEDDLAVYLKTSAKLSEAKENFEQLTALIASGEIAYSAAQDTLKEIDAALITISTEQDKFAEELRSLRKDELEARDDAERMRRAIITLDRKMERERLPGLPEEYLSLREHMGESIDALEKRLEEKPLNMKAVSQDWRIAEEDLTHLTEKAEEMMENVRLVEHVIQYANRYRLRNKELADELVQAENHFYNDYQYKKALEIAVTALEKVETGAFKKVEKAYESKVSVDDIE

SEQ ID NO: 776 - protein, 655 aa, Listeria monocytogenes
MNRNEYNDDSIQVLEGLEAVRKRPAMYIGSTDVRGLHHLVYEIVDNSVDETLAGFGKKIVVTLHEDGSVSVSDEGRGMPVGMHKTGKSTVEVILTVLHAGGKFGQEGGYKTSGGLHGVGSSVVNALSEWLVVTINRDGATYQQKFKDGGKPDGTLKKIGKSKATGTTIRFKPDPAIFPTTSFNYETLSERLRESAFLLKGMLIELIDERVGMAEAFHFEEGVKNFVEYINEGKDVLHPVASFEGENATIEVEMAFQFNDGYSENILSFVNNVRTRGAGSHESGMKAAMTRIFNDYARRVNLLKEKDKNLEGSDIREGLSAVLSIRVPEKILQFEGQTKEKLGTQEARQAVDAVVAEHLAYFLAENPETSSLLVKKAVKAREAREAARKAREETRNGKKKKRSETLLSGKLTPAQSRNPNKNELYLVEGDSAGGSAKQGRDRRFQAILPLRGKVINTEKAKLQDILKNEEISTIIHTVGAGVGTEFDVEDCNYDKVVIMTDADTDGAHIQVLLLTFFYRYMRPLVEAGKVFIALPPLYKVSRGSGKKEVIEYAWTDEELDSAIQKIGKGYMIQRYKGLGEMNADQLWETTMNPDTRTLIRVRVDDSARAERRVATLMGDKVEPRRQWIEKHVEFSMEDSQNILENENMMVEEAKDI

SEQ ID NO: 777 - protein, 145 aa, Listeria monocytogenes
MHQAIGIIEIKGLASAIAVADTMAKVANIQLVDTEKAKGFGWITVKVEGDVAAVNAALEAGEQTAIASDSFIAKKVIPRPGEEIFTVFWPKEEIEPEKPEVMVETEKVEETEAPTEATCNLCHDPLCPRVKGDPRQDCIHFEEEK

SEQ ID NO: 778 - protein, 819 aa, Listeria monocytogenes
LSNPEQHIQDLALEEVMGDRFGRYSKYIIQERALPDVRDGLKPVQRRILFAMNVEGNTAEKGFRKSAKTVGNVIGNYHPHGDSSVYEAMVRMSQDWKVRNMLIEMHGNNGSVDGDPPAAMRYTEARLSPISAELLRDIEKETVDFIPNFDDTSSEPTVLPARFPNLLVNGSTGISAGYATDIPPHNLTEIIEAVIKRLDNPLCTTDDIMKIVKGPDFPTGGIIQGIDGIRKAYQTGKGRVVVRSKTEIEDIRGGRKQITIHEIPYEVNKANLVKRMDELRIEKKIEGISEVRDETDRTGLRIAVELKKDANAEGVLNYLFKNTDLQVSYNFNMVAINKKRPELMGIIPMLDAYIEHQKEIITKRSEYDIRKARARQHILEGLIKALSILDEVIKLIRGSKDKRDAKLNLQTKYDFSEKQAEAIVSLQLYRLTNTDIHELQSEAKSLAEQISVLEKILGDEAELIAVLKEELAEIKKKYKTARRTEVQAEIAEIKIDTEVLVANEDVIVSVTKEGYVKRTSQRSYAASNGAELAMKEADHAIFIQKMNSLDSLLLFTSKGNFIYRPVHELPDIRWKNLGDHVSHLASDLSAGEEIRSAIAIQAFTEEKRFLFVTKNGMTKQSAITNYKPQRYSKSMMAIKLKGDDELLSVHLIDGTEDIFLATKNGYGLRYSITEIPESGARTAGVKAINLKQDDIVIGGIVLMPNEQKHILLATQRGSLKQMKASEFEPISRAKRGLLMLRELKSNPHRFIGITLADNNDHLFIETNTDQIVEIDVANLRITDRYSNGSFVLDETMEGEPTSIWLAIPEIKDTSDAKEE

SEQ ID NO: 779 - protein, 155 aa, Listeria monocytogenes
MAEKMNVESFNLDHTKVKAPFVRLAGTKVGVHGDEIYKYDVRFKQPNKEHMEMPALHSLEHLMAELARNHTDKLVDISPMGCQTGFYVSFINHSDYDDALEIIATTLTDVLVATEVPACNEVQCGWAASHSLEGAKALAEEFLAKRSEWKNVFGE

SEQ ID NO: 780 - protein, 622 aa, Listeria monocytogenes
LKRTTRYSRKYVPSIDGLRALAVIAVIAYHLNFSWAKGGFIGVDIFFVLSGYLITNILLTQWEKNQSLQLKQFWIRRFRRLIPAVYVMIVVVVIYSVFFHPEILKNLRGDAIASFFYVSNWWFIFHNVSYFDSFGLPSPLKNLWSLAIEEQFYLIWPAFLLVFLKWVKNPKLLLKIVIGLGLLSAVWMTILYVPGTDPSRVYYGTDTRAFDLLSGCALAFVWPFNRLSPVVPRKSKAVLNIAGTISILCFILFTAFVSEYQPFLYRGGLLFVAILGVIMIATISHPASYLSKIFSFKPLRWIGTRSYGIYLWHYPIITLTTPVLEITQPNIWRAILQVAATFIIAELSFRFIETPIRKNGFINYFKGFKDKNYFIWKNKPVGKWLSIAGVVAVLAIFTLGMSNVLSVNTNAEKQQTSVKTTTSTPDEKKDDKKEDKATKDKEADSNKASEQKETQKPDNKNKSAATPKTIITQTVAIGDSVMLDIEPYLKEAVPNITIDGLVGRQLRDAITTATGYKKFNSENSSVILELGTNGPFTEDQLNDLLDQFDKATIYLVNTRVPRGWQSDVNKSIANAASRPNVTVVDWYSRSSGQSQYFAPDGVHLTKAGAQAYVAMLTSVMNK

SEQ ID NO: 781 - protein, 232 aa, Listeria monocytogenes
LTEIFAHRGSSGTHPENTLPAMKAAILSGADGIELDIHVLKSGELIVMHDERVDRTTNGTGFLKDYTLSEVKKLVIGKRLFRKIRVPTLEEIFKLVSGTDMILNIELKTDVFEYEGIEQKVLALADKFPEVKRMYSSFNPDTLIRLRDLNPTAKLALITHENLDEVLPLHEKIQLDAVHPPVKAMKNPILKQIAARYWTVNKEETITHFIDANVKGMMTDFPERAAALRNNK

SEQ ID NO: 782 - protein, 558 aa, Listeria monocytogenes
MVQLFSAFDRETIERNLQEEKFDLVIVGGGITGAGIALDATSRGMSVALVEMGDFASGTSSRSTKLVHGGLRYLQQFEIKEVADLGKERAIVYENGPHVTTPEWMMLPFHKGGNMGKTTASFGIRLYDYLAGVKKNERRKILSAKETLAKNPFVKKDGLKGSGYYVEYRTDDARLTIEVMKKAVELGANAINYTKAEHFLYDDNKQVVGVTVTDRLSGKAYDIKGHRVINAAGPWVDKVRKLDYATNNKHLRLTKGIHLVIDKQKFPMEQAVYFDTPDGRMVFAIPRDKKVYVGTTDTVYDEAVINPKALESDHNYVIKAINYMFPDVHITEKDIESSWAGVRPLIYEEGKDPSEISRKDEVWFSESGLITMAGGKLTGYRKMAEKLLDDVSKTLAKETGKKYKTVQTKHLPISGGDIGGSEQLEAFLSKKAKEGNNRFGWTLEEGREMAKRFGSNIDQLFTYAQEHKEQNETTLPNSLYAELRYSIQHEAVTTPIDFLLRRTGYLLFDMPYLLEWKDAVVDEMAKQFHWSDDVKQTYIEELNIQINDAREPADWHDR

SEQ ID NO: 783 - protein, 115 aa, Listeria monocytogenes
MIPVVSKPAIYFHADVDANPDSIKQVLFGIEEEGIPCELEIMPLKDEVQAAFRASASSPLLVGVTLKNDHLVIHYRNLPPDKPLFSAHRFCASTLENQRNMGMNAARLVKGVPFK

SEQ ID NO: 784 - protein, 305 aa, Listeria monocytogenes
LSKIPVIVIVGPTAVGKTSLSIELAKKLDGEIISGDSMQVYRGLDIGTAKITPEEMDEIKHYLIDVTDPSEPFTAAKFQTETRKWIETIHQAGKLPIIVGGTGLYIQSVFYDYDFGNVSEDKAYRAELEQLNKTLLWQMLEQQDPESAAQIHENNKRRVIRALEVMHLTGKPFSEYQVHNVLNDTYKPLFLGLDLDRALLYERINQRVNLMFEEGLVTEAKKLYDQHLVDVPAVCGIGYKELFPYFEGKSSLEEAKELIQKNSRHFAKRQLTWFRNRMEIDWIQAGVSTTEAEALNKAETFLSVK

SEQ ID NO: 785 - protein, 77 aa, Listeria monocytogenes
MKQGGQGLQDYYLNQLRKEKILATVFLTNGFQLRGRVVSFDNFTVLLDVEGKQQLVFKHAISTFSPQKNVALNPDAE

SEQ ID NO: 786 - protein, 407 aa, Listeria monocytogenes
VEREKIILVGVFLPNKTEEAFWNSMKELHSLAKTANAEVMDELIQKLERVNQASFIGSGKLDELAALVEMHEADVVIFNSELSATQVRNISAAVEARIIDRTQLILDIFAMCAKSREGKLQVAYAQYKYLLPRLSGQGISLSKLGGGIGSRGPGESKLEMDKRHIREKMHDIKAQLTHVEQHRKRIIERRNTQSVFRFGLIGYTNAGKSTIFNRLTNETTLQENKLFATLDPTTRKVRFSGGFQTLLTDTVGFIQDLPTTLIAAFRSTLEETANVDVLIHVVDASNPDYLQHETTVISLLEELEMNHLPTLVIYNKMDHAPATFVPDQPESLLISALDQEAPDTIKQRMIQLIEKNWAFFTIELSEEKGKELAQIKQQAWVTKLEYIESKQSYHIEGYKPRKELNNE

SEQ ID NO: 787 - protein, 408 aa, Listeria monocytogenes
MNNIQAMRKKVEVQIADLQNETDEIAEFNQAKVLDAFQENKVSDFHFHPSTGYGYDDEGRDTLEHVYATVFKTEAALVRPQIISGTHAISTVLFGILRPDDELLYITGQPYDTLEEIVGMRNQGQGSLKDFHIGYSSVPLLENGDVDFPLIAEKMTRKTKMIGIQRSRGYADRPSFTIDKIKEMIIFVKNINPEVIVFVDNCYGEFAEYLEPTEVGADIIAGSLIKNPGGGLAKTGGYIAGKEALIDLCGYRLTTPGIGREAGASLYSLLEMYQGFFLAPHVTAQAIKGARFTAAMLAEFGVVADPTWDAPRTDLIQSISFHNKEKMVAFAQAIQAASPVNAHVLPIGAYMPGYEDDVIMAAGTFIQGASLELTADGPIREPYQLYVQGGLTYEHVKIAVTRAIQKTL

SEQ ID NO: 788 - protein, 122 aa, Listeria monocytogenes
VSEKEIRRSMPLFPIGPVMKLTDLTARQIRYYEDQGLIHPARNQGNHRLYSLQDIDVLLEIKDYLNDGLNIAGIKKMYQMQQKESKEPLTDDDVRKILRKEMQQAGRFVKQDATGKQQLPRF

SEQ ID NO: 789 - protein, 444 aa, Listeria monocytogenes
MAKYTKEDIFRFADEQNVKFIRLQFTDILGIIKNVEIPVSQLKKALDNKIMFDGSSIEGFVRIEESDMYLFPDLDTWVVFPWTAEKGKVARMICDIYNPDMTPFAGDPRANLKRVLKEMEELGFTEFNLGPEPEFFLFKLDENRRPTLELNDSGGYFDLAPTDLGENCRRDIVLELEEMGFEIEASHHEVAPGQHEIDFKYEDAVTACDSIQTFKLVVKTIARKHGLHATFMPKPLFGVNGSGMHFNMSLFNEKGNAFFDESGELELSQTAYHFLAGMLKHARGYTAVTNPTINSFKRLVPGYEAPCYIAWSGKNRSPLVRVPSSRGLSTRLELRSVDPSANPYLAMAVLLKAGLSGIKDELTPPAPVDRNIYGMNEEEREATGIYDLPESLGHALIELEKDDIIKAGLGEHIFEHFIEAKTIECDMFRTAVHPWEREQYLEIY

SEQ ID NO: 790 - protein, 431 aa, Listeria monocytogenes
MQITLAILVFVLTLFFVIWQPRKLSIGWSACGGALIALLLGVVTLADVMTVTGIVWNATLAFIAIIIISLILDEIGFFEWAALHMARLARGNGLLMFILISILGALVAALFANDGAALILTPIVLAMVRALDFDEKKVFPFIIASGFIADTTSLPLVVSNLVNIVSADFFGISFSRYALIMWIPTIFSLVASIIILYIYFRKALPRKYDVNAIQKPASALKDRKMFHISWGILTILVVGYFLSSFLDIPVSFIALLVALIFLLVGAKSHSVSTKAILKGAPWSIVFFSVGMYVVVYGLQNVGITKLLSEAITYVAHFGLFAGTIGMGFIAAILSSVMNNLPTVMINALAIDHTSFTGVMKEALVYANVIGSDLGPKITPIGSLATLLWLHVLAQKGIKISWASYFKIGIVITIPVLFITLVGLYVSLLIWN

SEQ ID NO: 791 - protein, 173 aa, Listeria monocytogenes
MIYFETERLIARDYLERDYLPFSQMNADEEVMKYFPARLTQVESNALLDRNQKELTSLGYGLFAIEVKSTNEFIGFTGLHEATFEAEFTPCIEIGWRLKRSAWNQGFATEAALGVLAFAKGITAINEIYSFTATCNKPSEKVMRKIHLTKIADFEHPALINGNPLKPHVLYKA

SEQ ID NO: 792 - protein, 204 aa, Listeria monocytogenes
MKISKRQQDIYEFIKSEVKEKGYPPSVREIGEAVGLASSSTVHGHLARLEGKGLIRRDPTKPRAIEILSLEDEAETPNVVNIPIIGKVTAGMPITAIENIDEYFPLPEYMAAGETNVFMLEIDGESMINAGILDGDKVIVRQESSAINGEIVVAMTDENEATCKRFYKEANHFRLQPENDALEPILLNNVTILGKVIGLYRDIR

SEQ ID NO: 793 - protein, 109 aa, Listeria monocytogenes
MTLKLIWDKFYVSIIFVLTCIVLGIILMCTVVGGGSDYSEVNVNEGDSLWALADQYAGKSDMAKADFVSWVEKENNLSDGHVEAGDSVVIPVHKTKLLKSDSTIQLANQ

SEQ ID NO: 794 - protein, 664 aa, Listeria monocytogenes
LFDNTDSLAVNTIRTLSMDAIQKANSGHPGLPMGAAPMAYALWSRVLNTNPKNSHWFNRDRFVLSAGHGSMLLYSLLHLSGFKLELEDLKNFRQWESKTPGHPEYRYTDGVDATTGPLGQGIAMAVGMAMAERHLEAKYNKDGFPVVDHYTYALCGDGDLMEGVASEAASYAGHQQLGRLVVLYDSNDISLDGDLDKSFSENVKQRFEAYGWEHLLVKDGNDTAEILAAIEKAKQNTSQPTMIEVKTVIGFGAPNAGTSKVHGAPLGDEGILEAKKAYGWNYEEKFFVPEEVTARFKETIGERGEKAEKAWNELFASYKAEYPELAKQLEDSLNNKLPADWDADLPVYDDSKALASRASSGEVINALAGKIPTIFGGSADLAGSNNTTIKTDGEFTKATPAERNIWFGVREFAMGAALNGMALHGGLQVYGGTFFVFSDYVRAAIRLSAIQHLPVTYVMTHDSIAVGEDGPTHEPVEQLASLRAMPGLSVIRPADGNEVVEAWKLAITSTSTPHVLVLTRQGLPTLPNSAKLTAEGVKKGAYVISPAKGEVPEAIILASGSEVNLAIEAQKELQAQGTDVSVVSVPSFDLFEQQSAEYKESVLPNAVRKRIAVEMGASFGWERYVGLDGKVIGIDKFGASAPGETVIKNYGFTVENVVNTVKSL

SEQ ID NO: 795 - protein, 79 aa, Listeria monocytogenes
MWIYILVGIICLLAGLAGGFFIARRYMMSYLKNNPPINEQMLQMMMAQMGQKPSQKKINQMMSAMNKQQEKEKPKKAKK

SEQ ID NO: 796 - protein, 280 aa, Listeria monocytogenes
VHNPNLFNTLKQNEYTLPKDPNTSNEIIDTMLSYLSSTDSELRDNIAYNIFSEWLVVQDNLTTEQKMRIYNYAVNKNNLLFKINIIDSDAVFQRSFLALIIALLLENNKVHNFLTDSEIRETLNLLIELLKNEKNTHSFIEEKGWAHCIAHTADALDELIYQRTISEIDVKKIMTTIAFFYKTNTKMLTGEEDERLSNILITALFEQKISNEEVKNWLISISETIPSYLPEIPLINIKQFTQTLLIKLTVLNYDVDFSLFPIVTRYIRKNDDNSTNKKAL

SEQ ID NO: 797 - protein, 243 aa, Listeria monocytogenes
MKENKYDDKHFFEQYSQMPRSKEGLQAAGEWHEFKKLLPDFHQKVVLDLGCGFGWHCIYAAEQGAKKVVGVDLSARMLTEAKHKTTSPIVHYERRAMENIDIEPETYDIVLSSLALHYVASFNDICQKVNTNLITGGSFVFSVEHPIFTADGRQDWFTDEAGNKLHWPVDRYFNESIRTSHFLGEDVQKYHRTLTTYIQTLLKNGFQINSIIEPEPAPELKDLPEMQDEYRRPMMLIISATKN

SEQ ID NO: 798 - protein, 168 aa, Listeria monocytogenes
MNYKSPVYSVTPIHYTKLQANNYNPNTVPATELKLLEKSIWEDGFTQPIVCYPLEDSDKYEIIDGFHRYTIMITSKRIRERENEFLPVVILEKDTVNRMASTIRHNRARGFHNVELMSNIVSELVDSGMSDSWIMKNIGMDANEILRLKQVSGLAHLFLDKEFSHTSD

SEQ ID NO: 799 - protein, 606 aa, Listeria monocytogenes
MKYIAGIDIGNSTTEVALAMANSSKEAAFVASAITDTTGIKGTKQNLHGIFKALRLALEKVNATTEDLAEIRINEATPVIGDVAMETITETIITESTMIGHNPKTPGGLGMGSGVTVLLDDVTSKSKDADYIVIIPKTVDFEDAAKQINTYVENGYQITAAILQADDGVLVHNRLNHKIPIVDEVGFIDKVPVDMLAAVEVAAPGKVIETISNPYGIATVFHLNSDETKNIIPVARALIGNRSAVVIKTPEGDVKARTIPAGHIELQSGSRTQRVNVAEGSEKIMQAIMSLPKLDNASGEPGTNIGGMLEKVRQTMAGLTDKLPADIFIQDLLAVDTFVPVDVQGGLAGEFSMEQAVGIASMVKSDHLQMAAIASEIEQELQVSVKIGGAEAEAAILGALTTPGTNTPLAILDLGAGSTDASIINGKGEIIATHLAGAGDMVTMIIQSEIGLEDRYLAEDIKKYPLAKVESIFHIRHEDGTVQFFDTPLSPTVFAKVVIVKPDGFVPIPGDVSIEKIKLIRRSAKERVFVTNTIRALKYVSPTGNIRDIPFVVIVGGSALDFEIPQLITDALSHYSLVAGRGNIRGKEGPRNAVATGLILAGGAKA

SEQ ID NO: 800 - protein, 434 aa, Listeria monocytogenes
MLSRTVFDASQERMEVIFSEFDNIIVSFSGGKDSAVMLHLMIDYIRKNNIRKKIYVYHLDYEGQYSATTDFVTEMLTTNLDIIEPLWCCLPIAAQSAVSMFTDHWKPWEKSKRNIWVRDMPTFPHVINEDNAPFDFDFENLWDYEFNKKIIHWLHTKNNAKKTIALIGIRQQESLNRYNAIHKKERMYKTYNWTTEISKNIYNAYPIHDWQVEDIWVANAKFNWSYNKIYDLFYHAGLTVHDMRVASPFNDAATESLKLYRVIEPALWSKLVGRVNGANFTAIYGGTSAMAWKEIKLPKNHTWKSYLEFLLTTLPSYTRERYLKKFKTSITYWTEKGGALKVETVEELKNLEIQADFLGKPQNNRVYTNPMEIVRFKEYPDDLKIKEFASVPTYKRMCIAILKNDYTCKYMGFGQTKLELEKRKNALEKYNNIL

SEQ ID NO: 801 - protein, 401 aa, Listeria monocytogenes
LKMTLLDNQKKAFIKLKKYKVGALFMKPGSGKTRVACELINDAKPDYVLWITPFQTKENLEIEINKWGYKFPQEIIGIESLSNSDRLYLYCRNKLKNSTNSYIIMDESLKIKNIHALRTQRAIKLSRLATYKLIMNGTPLSRNILDLWSQLEFLSPKILNLSFSQFKKTFCEYVTITQLTQSTQQSMDIIKKYHNLEYLYKLITPFIFTSSHELAVKWHYIRHDFSIDEELLKQYYEIKEDYLQKAAAYTININFLEMSQVMQHCYCLSSEKFTITESLIAGKEETTIIFCKYRRSEEALQQAFPNVKITTFAKSSYGLNLQFYNQIIYFDKTFDYSQRDQSERRIYRTGQTQDCYYHDLSGNVGLDSLIDTNISKKTSLLQEFKKELSQKNSFEVIMDAF

SEQ ID NO: 802 - protein, 124 aa, Listeria monocytogenes
MVKWHKIYTYSERVEQWDNQTIIEMPSESEYEGYFFLLPKKMVFSLTPQYSYFYFPDTWNFFLKKHTEKKELSVSKMILCFKKESDEIMQFFHTKKVNDSIVKVRTHIPKKIEKDVIIENDLIR

SEQ ID NO: 803 - protein, 242 aa, Listeria monocytogenes
MDTPDYKRVVLKLSGEALAGNDGFGINPSVVNLISAQIKEVVELGVEVAIVVGGGNIWRGKLGSEMGMDRAAADQMGMLATIMNSLSLQDSLENIGVATRVQTSIDMRQIAEPYIRRKAIRHLEKGRVVIFAGGTGNPYFSTDTAAALRAAEIEADVILMAKNNVDGVYNADPKLDENAKKYEELSYLDVIKEGLEVMDTTASSLSMDNDIPLIVFSFTEQGNNIKRVILGEKIGTTVRGKK

SEQ ID NO: 804 - protein, 185 aa, Listeria monocytogenes
MSKEVLSKSKEKMEKAEQALTRQLGTIRAGRANASLLDRLSVDYYGAATPVNQMASISVPEARMLLITPYDKTILGEIEKAILKSDLGLTPNNDGSVLRLSIPQLTEERRKELVKEVKKEAEEAKVAVRNIRREANEELKKLEKNGDITEDDLRSYGEDVQKLTDESIKNIDSITKDKEAEILEV

SEQ ID NO: 805 - protein, 252 aa, Listeria monocytogenes
MFKKLFRQDENILNSELAEDLPIPRHVAIIMDGNGRWAKKRFLPRIAGHKEGMDVVKRVTRYANAIGIDVLTLYAFSTENWKRPTDEVDFLMKLPVEFFDSFVPELIEENVRVNVMGYRENLPDHTMRAVEKAIADTAHCTGLTLNFALNYGGRSEIITAAKEAMKELELEGKSADDLTEEKLNDHLMSSGLGDPDLLIRTSGELRLSNFMLWQLAYSEFYFTDTHWPDFSKEDFLQAIIEYQNRSRRFGGL

SEQ ID NO: 806 - protein, 211 aa, Listeria monocytogenes
LAEGLRTIYFVRHGKTEWNMTGQMQGWGDSPLVAEGIDGAKAVGEVLKDMQIDAVYTSTSKRTQDTAAYILGDREIEIQPLEELKEMGFGTWEGIRVTEIDEKHPEERAKILHSPETYKAEVNGGETYYELAERLLEGVEKIIADNPNGNILVVSHGMSLTLLLYLLQGGTIEDHRKEAPRILNTSISIVEYQNGEFSLKKINEIGHLDLK

SEQ ID NO: 807 - protein, 628 aa, Listeria monocytogenes
MKRIVKIFLHYLLGILGIILISCVPAIFSKVTSWSSSTYWEALKSIFTAIFHPTKWEISYQGSAEVFHVSLADFITGPYFYSMKIIVASLVISALIAYLLVIATFRGPKWLRRGLSGFLSILQAFPDFSFIFLIQMAVVYIYQQTGVFTLNFYSLNGEQIYAAPIVCLSIIPTVLFYKMMMLLMENEWQADYIQLARGKGLNDKAILLRHATPNMMQSLFYQSKTIVWFILSAYLVVEFLFGIEGVLYYLLAGFSPLNIFLVLALVFTPFYFFYTLIDLWISCGKNTESANVTRIPLHWNSFQKTFKEKVNLKSKWRNFVVTTGQLLKRPSFSIPLVTLSILLIASLIYGLMGDKINSLKFISDATGRVTDMAPFKPNAQVWLGTDQAGNSILDQLLVGIKYTLLIAVIIATLRVVIGYILAVPLAFFSKPRTRNFVQATADGMHYLPLSLLVFIIMVNEFISYSGVFETSLFTRITFQILIMVVIVLPITTNRISSEISQVLKKEFVLSALVFGGNARWILTKHINPQIWSKLILIWIEQLIQTLQMFVHLAIFGIFIGGAIMGADDGMLNPAIPELSGLIANAKFVFANHQFWIILPPLVVFMILILCFQMMANSLLKREEDSKKA

SEQ ID NO: 808 - protein, 209 aa, Listeria monocytogenes
MAEYQSQLARIQAKITTLKEKDVDLNLFGSESHAYKLNQPLSNQTIAAFENEHQIALPQGYRAFLEQIGDGGMGPYYGLETLVDGLCSSLDYKAEKYGVQTLSKPFPHTDDWNGPGYKEGMSDEAYDAWQELCFSDKEVFGLLRIANFGCGVSINLVVNGPSYGEIWVDDRNNDNGVYPDFYFGNEERLGFLEWYELWLDKSIEEFEKA

SEQ ID NO: 809 - protein, 170 aa, Listeria monocytogenes
MNQEALENMVRNILQEVNSGGVSTTTSQKVSGDTLTVRDYPLGTKRPELVKTSTSKSLDDITLKSVLDGTIKPEDVRVTAETLKMQAQVARDAGRATLANNFERAAELTIVPDERILEIYNAMRPYRSSREELLAIADELESVYHATICSNYVREAAQLYQERKKLKGDN

SEQ ID NO: 810 - protein, 478 aa, Listeria monocytogenes
MEHQKRSPFPKDFLWGSASAAYQIEGAWDADGKGKSVWDEYVRIPGTTFKGTNGDVAVDHYHRYKEDVKLMADAGLKAYRFSIAWTRIFPNGKGEVNEAGLQFYDNLIDELLKYDIEPLVTLYHWDIPQALFDEYGGWESRQVIEDFTNYSTTLFKRYGDRVKYWVSLNEQNIFVGMGYGQALHPPKVSDPKRMYAVNHIANLANASVIKAFHEIVPDGKIGPSFAYTPHYPIDTDPKNVQAADDAEELNSYFWMDMYAFGRYPKAVWKYLEENDIAPVIEDGDMELLASAKPDFMGVNYYQSATVAYNPLDGVGQNNEMNFTGKKGSTKETGVPGVYKKVVNPFVKTTNWDWTIDPKGLQIALRRINSRYALPILITENGLGEFDKLVDGEVNDDYRIDYLSAHATAIRDAISDGVDMLGYCTWSFTDLLSWLNGYQKRYGFVYVDRDVEDDAPMTRIPKKSYYWYKQVIETNGADL

SEQ ID NO: 811 - protein, 270 aa, Listeria monocytogenes
LYKLIAIDIDGTLLTDDHKVTDEVKEAIRQAKLKGVKVVLCTGRPLVGVENYLTELELREEGDYVISFNGAFVQDTFTKEVISHLTLGIEDLKDIYEVSLNSNLHMHFFDDKALYTPNREIGKYTIVEAYLTGSQLIYKEIENVPEDFIMSKAMFIEEAPELEVGIAKIPESFREKYHLVRSTPFYLEILNRDASKGNAVKELSEKLGIKQSEVICIGDQENDVTMLEFAGLGIAMGNAPERIKQLADYTTASNNDSGVAKAIQKFVLDK

SEQ ID NO: 812 - protein, 167 aa, Listeria monocytogenes
MKRNYHVKFLNEKDVELAEAVCAASEDYYLIEQDKSASKSDALKIITEIPDGKTRFDKFVLAVLDENEKPIGLVDIVSDYPRKGRWFIGLLLLTPDARHNGLGKVLHQTIKEWASDGGADSLALGVLAENEKGRGFFEHLGYTKEETKQASYGGKEQEVSIFTLAIK

SEQ ID NO: 813 - protein, 220 aa, Listeria monocytogenes
MAYPFNHKEFVAMMEQYNLKSNSITIPEHTILNDLVTENRDCVYLLKSGILAGYIDFDNDKIYSIFTSNFFMGYYTIFDNSSLVLTYQTLTECELIIYKKKDIEYSLSLFPENFSFQYTIMRTIAKHGYYKSLLQYRDKKDQLAFVFEMLVKILDIPVEDGVAVLPKSISTTVIKNYCTLSKAFFYSQLKELKEAGIISKVKLQWRINMEALSEKNNSIN

SEQ ID NO: 814 - protein, 280 aa, Listeria monocytogenes
MKKGILNVLLVFALIAGLSVPSSMQVEAAAPTIKVHFIDVGQGDAIYIKAPSGEDILIDAGNKGKGKTVVNYLKKLKVKDIEIMIASHSDADNIGGLPEVMNNIKVKNLYAPKSTNTTAAYKNFVNTAKKKKLTIKTAKAGVKLPVKGVNAQFVGPVKTYGKTDRNNWSAVLHVAYKKNTFLFTGDAQTKAENDMIKAKKTLRADVLKVSTQGSKAATSKAFVNVVKPKYAIISVGKNGYGHPTSQTVNTLKKAKAKVYRTDRNKTVVVTGNGSSYSIGK

SEQ ID NO: 815 - protein, 273 aa, Listeria monocytogenes
LTKKYLICSDIDGTLLRQDQTVSKKTRDLIQTLEKDGHIFSISTGRMYRSAREVGFQVSSSGHVIASNGSYAAIRDEQLLKTTLEEKAIRSTYDIMSDFDLPLFFFSTNTLFYTKEPPAFFQNLADKSRLDTGHNSFSLVSINEKGIFDENMHQFLNAIVVAEEDASKLTEVRAALNEANGIRVLSSHHNNLEILPANSDKKTAVEALGKHYNIPRERIITFGDGENDIGMLQYAGTGVAMANASDNVKAAANHLTDTNEADGVYKFLKEFIS

SEQ ID NO: 816 - protein, 323 aa, Listeria monocytogenes
MGNLNWAILGPGSIAHEFAEGMRGMNREIYAVGARSLEKGQAFASQYGIENVYDDFDKMLADPAIDVVYIATPHSNHYEFIMKSLHNGKHVLAEKAITVSSKELNEINVLAKEKGLIVKEAMTIFHMPLYKKLREIVESGAIGKLKIIQVAFGSAKEKDPKNRFYNMDLAGGALLDIGTYALSFARYFLSETPDEVLTTMKKFETGVDEQSGILLKNNEEELAVVSLSFRAKMPKRGVIACEEGFITVDEYPRASRATVTHTATGKVEEIEVGETSKALEYEITAMEESVATGENMTYQLTNDVIAIMSDVRTQWGIKFPFEK

SEQ ID NO: 817 - protein, 366 aa, Listeria monocytogenes
LAQLSLEHIYKIYDNKVTAVSDFNLEIDDKEFIVFVGPSGCGKSTTLRMIAGLEEISKGELSIDGKVMNNVAPKDRDIAMVFQNYALYPHMTVYDNMAFGLKLRKMPKDEIKKRVEHAANILGLTEYLKRKPSALSGGQRQRVALGRAIVRDAKVFLMDEPLSNLDAKLRVQMRAEITKLHQQLDTTMIYVTHDQTEAMTMATRIVIMKDGVIQQVGSPKQVYDHPVNMFVAGFIGSPAMNFFKGRLEGSNFIGDDFTIEVPEGKLKLLKDRGFDGKNIVFGIRPEDIHDEPIVIEANPGYTFKATTIVAELTGAEFMLHSRVGTHEFVARVDARSEHQPNEVLTLAFEMSKSHFFDPETEDNLTD

SEQ ID NO: 818 - protein, 710 aa, Listeria monocytogenes
MYVEQLNEQMVIKRDGRKASFDLIKIRNAVEASMKAINLEDETFLEEILLEVVSELPNKADMTIDEIQHCVENTLMKSTYPDVARAYIEYRHDRDHERENITDMHKSVEKLLQKDKTVVNENANKDATVFNTQRDLTAGAVAKSYALKYMLPKHVSNAHLKGEIHFHDLDYSPYHAMTNCCLIDIEGMLSKGFTIGNANVESPKSIQTATAQIAQIIANVASSQYGGCSVDRIDEVLSVYARLNFEKHKKDAMEWVVPEKQEGYAAEKTRKDIYDAMQSLEYEINTLYTSNGQTPFVTLGFGLGEDWFAREIQKAILKVRIGGVGKDKHTAIFPKLVFSIRRGTNLNAEDPNYDIKQLALECSSKRMYPDVLNYDSLVRLTGDFKVPMGCRSFLPAWENENGEHVNAGRNNLGVVTLNIPRIAIQSGGDKERFWEIFHERMKTVKDALLFRLNRVRQARPENAPILYKYGAFGKRLQDGEDVDQLFNKERSTISIGYIGLYEAATVFYGGEWEGDKEAKNFTLDIVKELKAYADNWKDEYGYWFSVYSTPSESLTDRFNRLDKEKYGVIKDITDKDYYQNSFHYDVRKKIDFEKDYPEFCSGGFIHYCEYPKMVHNTKALEAVWDYSYDRVAYLGTNTPIDKCYECDFEGEFVPTEEGFKCPSCGNTDPEKADVVKRTCGYLGNPMKRPMVHGRHVEISNRVKHMENLGE

SEQ ID NO: 819 - protein, 219 aa, Listeria monocytogenes
MVEINEKVLRGIISEVLDELQLKEDKVSFQKEQPSVAVSDESFLTEVGDAEPGRQKDEVVIAVAPAFGKYQTKNIVGVPHKQILRELIAGIEEEGLKARVVRVFRSSDVAFVAVEGDKLSGSGICIGIQSRGTALIHQKDLQPLSNLELFPQAPLITLETYRAIGKNAAKYAKGESPNPVPMVNDQMARPKFQAKAALLHIKETKHVVQGKNAVELQVN

SEQ ID NO: 820 - protein, 183 aa, Listeria monocytogenes
VNNPKPCEWKSNELSRGYIADYKAFNFVDGEGVRCSLYVSGCPFHCEGCYNKAAQSFKYGKPYTKELEDDILKDIGHESVQGLTLLGGEPFLNTATCLSIVKRIRATYGETKDIWSWTGYTWDEMMQETADKLELLSLIDVLVDGRFEQKLFDPNLAFRGSSNQRIIDVQKSLAAGEVVLYEL

SEQ ID NO: 821 - protein, 223 aa, Listeria monocytogenes
MDALFNYKEFVRLSHEGNIKYEKLKVPKHTDLVDTASQRNNHVYLIVEGFVSISMNPQSNSIYTVLGKGSFVNYYSLFQGNVDDFLFTAISPCTIYKYSFKDLEYFLSMFPENFGFQFFIMRDLARHAFFKSLFAETSSSDKLELSFSNMGKLHGTLYEKDSVILPKEMRTSTIAAYSNLSKSSFYKQLTLLKEHGKIWKKGKEWVVKDKGLYNYVKVRQFDD

SEQ ID NO: 822 - protein, 259 aa, Listeria monocytogenes
MWKLALCQTDVVFKYPDANYARIEKAIVEAAKNGADIAVLPEMWNTGYALNELAGVADLNGGRTKEFLATLSEKHQIAIIGGSVSISEGTKFSNTMYAFDKYGGLLSSYKKVHLFQLMNEHLYLEAGNDKNLFRLDGVSCAGFICYDIRFPEWIRKHTSEGSEVIFVSAQWPAERVTQWEQLLIARAIENQTFVVAVNRVGDDPNNHFNGHSLVIDPLGNIVVHGGEEEGNIYAEIDLNLVAETRGIIPVFTDRRPELY

SEQ ID NO: 823 - protein, 220 aa, Listeria monocytogenes
MSLFFEEWGPILWQGFLETLTMTGITLVISLAIGLPLGVFLTLTRKGGQSENLVAYSILNWVINILRSLPFIILLFLMIPVTRFVVGTTIGIQGVIMPLVVFTAPYIARLMESALLEVDRGVVEAYQAMGISTPKIIWSVVIREARSGIVLGLTIATIGLIGATAMAGLVGAGGLGTIAYQYGFQRFEPTVMYTTIIILIIMVQALQSFGNFLSRRLKKD

SEQ ID NO: 824 - protein, 338 aa, Listeria monocytogenes
LIELHQVSKSFNVNGKTVEAVKNVSITVEKGEIFGVVGYSGAGKSTLVRCINLLERPDAGQVVIDGKNLSTLSSKELRVARRKIGMIFQGYNLLKTATVYDNIAKPLKLEGVPKNEIETRVNKYLSIVGLEDKRNNYPSQLSGGQKQRVAIARALAHEPEILLSDEATSALDPETTEAILQLLLKINAELGITIFLITHELDVIQRICDRVAVMENGHLVEQGTVLDIFTKAKHATTKRFVGSEASFDIPQDLLEKYVATGKLVSLHFIGDEADEPALALVSRKFDVLPSILAGGIDHLKNGTLGKLLVHLKGDEVEYSKAISYLKESGVVVEEVELL

SEQ ID NO: 825 - protein, 273 aa, Listeria monocytogenes
MKKLTKGLGILLASSLVLGLAACGGGSDDKALSTEKITIGTTAGPHQQIAEEVQKLAKKDGLEIKIKTFDDYNTPNTALNDGDLDANNYQTIPFLEQQKKDKGYKLDVAFKTVAFPMGIYSNDIKDLKNLKKGDKIAVPNDPSNEYRGLKLFEDAGVIKLKDGVEEKATKKDIAENPLDLEIVELEASQIPAQLDEVAAAAINTNFAMGAGLSINKDAIYHEPTKDNPYPNVFVVRSANKDDEVVKTLEKYYHSDEVKAFIEKEFNGSVVPAF

SEQ ID NO: 826 - protein, 554 aa, Listeria monocytogenes
MKSKRFEELAKRPVNQDGFVKEWIEEGLIAMESPNDPKPSIKIENGKVVEMDSKKLADFDLIDHFIAKYGVDLSRAEEVMQMDSVKLANMLCDPNVPREKIVLLTTAMTPAKIVEVVSQMNVVEMMMSMQKMRSRRTPTTQAHVTNLRDNPVQIAADAAEAAIRGFDEQETTVAVVRYAPFNALSLLVGSQTGRGGVLTQCSLEEATELELGMRGLTCYAETISVYGTEPVFTDGDDTPWSKGILASAYASRGLKMRFTSGTGSEVQMGYAEGKSMLYLESRCIFITKAAGVQGLQNGSISCIGIPGAVPSGIRAVLAENLIAVMLDLEVASGNDQTFSHSDIRRTARLLMQFLPGTDYISSGYSATPNYDNMFAGSNFDADDFDDYNILQRDLKVDGGLTPVTEEEVVAVRNKAARVIQAVFDKLGLPEVTDAEVEAATYARGSKDMPERNMVEDIKAAAEMMDRGVTGLDVVKALSAGGFDDVAESVLNMLKQRVSGDFLHTSAIIDKDWNVISSVNDLNDYAGPGTGYRLEGERWEKLKDIAVAVDANELD

SEQ ID NO: 827 - protein, 295 aa, Listeria monocytogenes
LKEKKQRIIKSAKEVFQKQGYLKTSVQDMVDAAGISKGTFYNYFTSKEELAIVIFKQEYSVLHQRLEYTMAQDGAKKDNFTECLKIIIHFYTENGEILNITFSQTMIDDDFNAFLQNVRLKNMEWVKYQLLEVYGEETKPYINDITMLLSGMAAMYVFASGSKNVNTGLIERAIPYVVRRLDALVKDILESGEIVFTEADTENLVPDQTMIRKKRLAKLREALEELNVGIENADIADSDKWQYKESMNALVGEINNNEAPRDFMVQGTLLYLKQHVPASLTKEVNKLEACVNGLL

SEQ ID NO: 828 - protein, 493 aa, Listeria monocytogenes
LNSTAVERPVDVNGKSYSRSLLVVTMIIGAFVAILNQTLLATALPMIMDDLHITAATGQWLTTAFLLTNGIMIPITALLIEKISSKTLFITAMTVFTIGTIIASVAGSFPILLTGRIVQAAGAGIMMPLLQTIFLLIFPREKRGAAMGLMGLVIAFAPAIGPTLSGWIVDSYDWRVLFLILIPIAVIDIILAFFGMKKVVKLTDTKIDFLSIVMSSIGFGALLYGFSSAGNDGWGDTTVITMLIVGVVVIALFVWRQLVIDNPMLELHVFKYPVFSLSVILGSIVTMAMIGAEIVLPLYIQTIRGESALQSGLLLLPGAIIMGIMSPITGIIFDKIGAKWLTITGVTILTIGTIPFMFLTMDTPLWYIVVFYAVRFFGISMAMMPVSTAGMNALPNHLINHGSAVNNTIRQIAGSIGTAVLITVLTNVTKDNMPGKALMATDPASFAQKAQDASLDGMRAAFMVAAIFAAIGMILSLFLKTKKQEPIVKEYTK

SEQ ID NO: 829 - protein, 280 aa, Listeria monocytogenes
MTKQLLVLQSDFGISDGAVSAMYGVINSVSIDLQIYDLTHQIPQFNIWEASYRLLQTVTYWPEDTIFVSIVDPGVGSKRRSVAVLTEDGHYIITPDNGTLTHIAHYGTIKAVRLIDEEKNRLPKSGASHTFHGRDIFAYTAARLAAGVINFEDIGPAANPDSIVSLSLSDSYLEGDQAFGTIDIIDRPFGNLWTNIRRTDFFELGANYGDSIEVLIKHHDRIVYKNFVTYSRSFADLRIGEALIYVNSLDNLGLGINQGSFVDAYSVGTGTSWKVTLKKV

SEQ ID NO: 830 - protein, 995 aa, Listeria monocytogenes
MGAKVSVQINGVARDVVEGTRMLDYLNAEGIQHPHICYSEQIGPIQSCDTCMCEVDGELMRACSTNLTDGMEIKTNSELAKDAQLEAMDRILENHLLYCTVCDNNNGNCKVHNTTELLGVEKQERPYREKGYLNDFSHPFYRYDPDQCILCGRCVEACQQVQVNETLSIDWERSQPRVIWDDDRPANLSSCVSCGLCATVCPCNALMEKSMLGQAGFMTGLDEDMLEPMIDMVKKVEPNYQTVFAVSEMEASMRETRTKKTKTVCTFCGVGCTFEVWTKDRKILKVEPTGEGPVNKFATCVKGKFGWDFVNSEKRITTPLIREGNEFVPASWEDAIHLVATKLREIQAKYGNDSLGFISSSKTTNEENYLMQKLARQVFETNNIDNCSRYCQAPASDGLTRTVGIGADSGTVEDIESAGLVIIVGASPADGHPVLASRIKRAQKTRGQKLIVSDLRKHEMAERSDLFIHPKQGTDFVWLTAVAKYMIDQGWHDEVFMENRISNVADYLAFLEPFTLEYAEKETGLSVETLKKVAQMVHEADGTAVCWGMGVTQNIAGSHTSSAIANLLLVTGNFGRHGAGAYPLRGHNNVQGACDMGSLPNVLPGIQPLGNDEVRARFEEAYGVSISSEPGLKNNEMLDAIEAGTLHSMYVIGEEMAWVDSNSNHVQEILASLDFFVVQDVFLSKTAQFADVVFPAAPSLEKEGTFTNTERRVQRLYEVLEPLGDSKPDWWIIQEVARACGRTDWNYDHPSEIMDEIASLAPFFAGVRYDRMQGFNSLVWPVSADGKDMPLLYEERFNFPDGKAQFSTLPYIAPITFPEEYNLTLNNGRLLEQFHEGNLTDKSKGLDYKLPEVFVEVSHELAKERDLESGSLVRLSSPYGRIKLRAVVTDRMKGNEVYVPMHSVSSETAVNLLTSSAGDVRTKTPAYKQTKVNLTVLEKTGKNPLPDHNPRNRKRFPQNGAEVARKWSREDYQPISKVNCACGGNCGCGGKGRNH

SEQ ID NO: 831 - protein, 233 aa, Listeria monocytogenes
MSEKAVQLTEFVGTAIGDTIGLVIANVDGQLLEAMKLEKSYRSIGILGARTGAGPHIMAADEAVKATNTEVVKIELPRDTKGGAGHGSLIIFGGDDVSDVKRAVEVALNELDKTFGDVYGNEAGHIELQYTARASHALEKAFGAPVGKAFGLMVGAPAGIGVVMADTAVKSANVDVVAYSSPADGTSFSNEVILCISGDSGAVRQAVISAREIGKKLLGALGDEPKNDRPSYI

SEQ ID NO: 832 - protein, 158 aa, Listeria monocytogenes
MAEPISTIRDTKKTPEELEKERLEQMKADIAEQDSGFIEILETVKLLQESGALEALNSAIKARGDITKTFLNEWRKEPMTNAINNMMISSKLLTDTKPEQTEEMIANLKNAAKKAEESAKNDEIMGMLAMMKALKDPDINRALRYGVTFLKEVGQTLK

SEQ ID NO: 833 - protein, 261 aa, Listeria monocytogenes
MDIVSHQKIRRFEAGTFQEIESSVATEYPLTIYVNDQELVTIVCTPEYLEDLVVGFLTSEGIVRGPRDINSVDIIEATGHAKVSANFVNKFNAKYRGKRYITSCCGKSRENFYFQSDASLVNVKQNGNLQLTTDMIFRLMEKFEQNSATFHQTGGVHNAALCSSAEIIYSRMDIGRHNALDKIYGRALQDGTSTEDKAIIFSGRISSEILVKTAKLGCGIILSRSAPTELAINMAEELNITTVGFIRGDRLNVYSGFERIT

SEQ ID NO: 834 - protein, 225 aa, Listeria monocytogenes
MKQILVVDDDRHILKLVGHYLRAEGFHVLEASDGVEAEKIVETEQVHLAVIDVMMPNMDGFELCQKMRASYPDIPVIMLTAKDALADKSRGFEVGTDDYVTKPFEPEELIFRIRALLRRSNQASEVKINIGNITIDQKSYGIKIGNQERMIPVKEFELLYQLASYPGRIFTREELIERIWQRDYDGSDRTVDVHIKRLRDHFDEEKDGIRIVTVRGVGYKLEETR

SEQ ID NO: 835 - protein, 459 aa, Listeria monocytogenes
MKSLYSRIVVTMLVVILSSSLLGFFFANIYYQIKLKLFNDEKTAKIAKEVQQFYESNATISLNEYLENVGELGYELYLTDGAEKSTYFGGAFRKKDLPDKTIKQVLDGDTYHGIDSFDTGIFITGFFDNDVRNTIGVPVQVDGKQLALFIRQDPEQQFGELRIFFAMILIFTSIISILFVLISGRYIVNPVVKLTNATKKIRKGNYDVAFEVRRKDEIGQLADSFTKMASELEKSEAARQEFVANVSHELQSPLTSMQGFARLLGSGTLTEKEQAEYLTVLSEETTRLSSLTKQLLTLASLDQESELRKKEPVHLAKQWRQLIQMTEWSWREKELTINLDLADVNYTGDAELLYQVWSNLLTNAIKFTPQGGNIQVRLYEDTTNVFVEVQDSGVGISKVDMTKIFDRFYKANESRTREEGSSGLGLSICQKIITLHHGEVTVQSSLEKGTTFTVKLPKN

SEQ ID NO: 836 - protein, 362 aa, Listeria monocytogenes
MFLALRELKHAKLRYILIGLIMVLIAWLVLFVTGLANGLANDNGAAISSNKATYYVLQKDSDNRLTRSNLTASETDSVAKQVKKSESTNLGVQMGTITPPNKDKKTDITYFGIDKTGFMKPAISEGTEPQKTKEVVADISLKESGYKLGSKLKDSATGEEFTITAFTKNNTFSHSPVIFVGWDAWKLVHQTNQAAEGEYNAVALDVSESTAKNLSLGSMELSSSEEVLQGIPGYSEEQGSLLMMIAFLFVIAAFVLAAFFYVITIQKINQFGILKAVGARTAYLGRSIVTQVVFLSVISLLIGNGLTFGLAAILPASMPFTLSPVLAIGCSALFLVVAVIGSMLSLYRVAKVDALEAIGRAN

SEQ ID NO: 837 - protein, 222 aa, Listeria monocytogenes
MTLMMKNITKNYQDGEQVIEVLKNVSLEVAQGEFVAIVGPSGAGKSTFLSIAGALLSPTEGEIAIGGKVLNDLTSKDLTKVRLDKVGFIFQGANLIPYLNVRDQLLVIAELSGDKGRVAKEKADELLKELGLTARENNYPESLSGGEKQRVAIARALMNDPDIILADEPTASLDASRGHKVVQMIADEVKRKNKAAIMVTHDERVLDLVDRVIRIEDGYLKD

SEQ ID NO: 838 - protein, 97 aa, Listeria monocytogenes
MLHIQAKVQVKPDLVAEFLVEVNLVIQGSLSETGNHGYELVCSVENANIFYILEKWADESAIQFHNGTEHYKLFKKNVPAFLATPIEVDLLAPVERR

SEQ ID NO: 839 - protein, 291 aa, Listeria monocytogenes
VKKYFITIMILLFGALSLSACQKDDEVENSSPPKVDLKNEIPIILIHGSGGDTHSLDEMADHLMNKYKSSNEAMSMSINSNGKIAYQGALTKDAKRPIIKFGFDQNQATPDDWSKWLKIAMEDLKSRYGFTQMDGVGHSNGGLALTYFAEDYSNDNAVPTLRKLVAIGSPFNDLDPDDNGDGLAFNKLPSNTPQLDYFIDKKTKISTDLEVLSIAGALSEDNLTDGIVPTNSSLASRLFMPNNAKVYMEDLQVGESAIHQTLHETSESIEKTHWFLEKSSPEKKEIKLISK

SEQ ID NO: 840 - protein, 151 aa, Listeria monocytogenes
MFKIIESKIKSQGQLSYFKDSHEFISEPRINSDTTILVGYIYIGFDSEYNESTQIWGFHHDFNWKSSKLTPPKFIQGKIILNEDFINPGESKRIGAANSWETIYDESSGWLRFGGVNNSVETCYVEFFPNTIMGIDENGDITELWLCPTLK

SEQ ID NO: 841 - protein, 95 aa, Listeria monocytogenes
MQEALGLVETKGLVGAIEAADAMVKSANVTLTGYEKIGSGLVTVMVRGDVGAVKAATEAGAAAAKNVGTVMSTHVIPRPHTDVEEILPVRVKSDE

SEQ ID NO: 842 - protein, 148 aa, Listeria monocytogenes
LRKLDFSYNNANYNAEFLMKILTTLKDITKVEQFTIEIIDAVPNDQEQFKEEKGLFSKEVFDFNNLVKESHGIKIDFKEITNILKQCRTVWELSMLVVTSENELNDSGKVLCEVELIEGDLFAILYSEDFNIDLFLEKFSTDEITIEG

SEQ ID NO: 843 - protein, 139 aa, Listeria monocytogenes
MAFEIVELKKETFTGNKVEIPEFDPQKGFGPMSEIKEAAYTKFAKNEKDYVGINASLDGLQYYIVASTNGENGDTTFDIPEGKYAKFVTSETDRPALDGFIGASYGEVGQSDTVGIAGSFNLEDLREAEFTLYIPVVSK

SEQ ID NO: 844 - protein, 306 aa, Listeria monocytogenes
MKIERLIGIIMLLLQRELVSASEMATMFEVSKRTIFRDIDTLAMANIPIYTIAGTKGGIGIMPTYKVDKKLLTADDLTAIIASLDGMEQLLSSAETKKTLQKMKNMLDHSSEPPKSSISLDFSNLSMKNELNAKVESLYLAIKKHQLVELSYIDRTGNQTVRKTEPYHLLFRNRSWYLQGYSLERSDFRTFKMSRIVELKTLEETFEVRPFTVKPFGAPPDRPMFLMHEVSLIVDKIAREQIIERFDLVEISQQDDAHFLAKVTLPDHEAGYRFLLQLGTHVTIQNRDDFYDNFIDYLKEIQGKYI

SEQ ID NO: 845 - protein, 100 aa, Listeria monocytogenes
MKNILLVCNAGMSTSFLVEKMKAAGTEQGVEANIWAVSDAELHENWEKADVILLGPQVGYLKGNTEKVVGGKIPVEVINMLDYGRVNGAAVLERAIELIG

SEQ ID NO: 846 - protein, 444 aa, Listeria monocytogenes
MAETKKKSIVNGFINVAQRLGGQIHLRSLRDAFASIMPFMILAGFVTLINYVILEPTGFMGKIVNPDTLRTWQEIGISIGNGTLSVITLLVTVAISYHLCLNRGYKNVIAPILVALSSFIVVTPIAMTFLPEGASKSIEVPNVIPVSYTGASGMFVGIIVGLIATDLFIKLSKNKRMQINLTGNIPPAVIKSFNVLIPIMITVIIFSVMSFAVNQIFSMDFNTLVTTIITKPLSYVTTSLPGFLLITSIANLFFGLGIHQAVISGPLLDPFLLQNMQENMVAYANHQEIPHIINMAFKDTFAVMGGSGNTIGLLIAIFIFGKRKDYKDISKLSAAPSLFNISEPIIFGLPIVFNPLLIIPFVLAPIFSLTTAYYATAAGWINHVVVQTPWTTPPIISGFLATGGDWRASVLQVIIIVVTVFIYLPFLRMDEKVAFATAQKSDAK

SEQ ID NO: 847 - protein, 480 aa, Listeria monocytogenes
MKELLTFPKDFWWGSAWSAEQAEGRGDTGKAKTVWEHWFETEPNRFYEGVGSEITTDHFNRYKEDVQWMKKTGQNSFRISISWARMFPDDGVGEVNQKAIAFYRDLLTEMNENGVKPFANLYHFDMPVALQDAGGWESREVVDAYVHFADTCFKEFGDLVYHWFTFNEPLGPILGGYLEGFHYPNQIDFKRGTQAGFNTILAHTLAIKAFKKINLSSKIGVILNLSPTYPRSQNEYDLEAAEICDAFYTRSFLDPMVKGTFPEKLVEIMREYDQMPEYTEEDLTIIKENTAQILGLNYYEPRRVKARLTAINEKSPFLPDWFFEPHNMPGKRMNIYRGWEIYERGIYDLCIDIRDNYGNIESFISENGMGVANEERFLNEEGQIQDDYRIQFVKDHLAYVHQAIAEGCDIKGYHLWTFIDCWSWINAYKNRYGLVSLDVETGKRTMKKSGEFYKKMSDMNGFEYETSKLVGTKREETTNG

SEQ ID NO: 848 - protein, 237 aa, Listeria monocytogenes
MSGMAKYMEIYIDIRDKINQNKYEINEKLPDGDSLARVYDCSKLTVKKALDMLVQEGMVIRRRGAGTFVKSHSTNGGEFALGPMSGLVNTFGKDNIKSKVILFSIEKPSKEVAEKLEMQDDYIYRIIRMREVGHKAYSIEHTYMPLAIIPGLEPRHLEDSIYNYIRDDLKLKMQSAHVWVRGDKSNQEDSKLLDLEEPTFMMEIEKLAHLEDGRVFEYSITRHTYESFVFETVFVQN

SEQ ID NO: 849 - protein, 111 aa, Listeria monocytogenes
MSKLPNCPECNSEYAYEDRGLLICPECGHEWSAAAEEASEEKVFKDANGNVLTDGDSVTVIKDLKVKGASNPIKMGTKVKNIHLVDGDHDIDCKIDGFGPMKLKSEFVKKI

SEQ ID NO: 850 - protein, 239 aa, Listeria monocytogenes
MGRKWANIKEKKASKDKTNSRIYAKFGIEIYVAAKSGDPDPHSNQKLRFVIERAKTYNVPKHIIDRAIEKAKGTGDETYSELRYEGFGPNGSMIIVDALTNNVNRTASDVRAAYSKNGGNMGVSGSVAYMFDNTAIFGVEGKDADELLELLMEADIDVRDILDEDGQAIIYAEPEDFHKVQEGLKAAGIEEFTVAEIEMIPQNDIQLSGEDLEKFERLIDALEDLEDVQKVYHNVELED

SEQ ID NO: 851 - protein, 169 aa, Listeria monocytogenes
VEEWDLLNENRELTGKTHIRGEKLAPGELHLVIHVCIFNEKGQLLIQKRQKDKEGWPNYWDLSAAGSALKGETSQQAAEREVQEELGIMIDLSGTRAKFSYHFEEGFDDYWFITKDVQLSDLTLQKEEVADARFVTKEELEALRSSGEFIPYFFLNQLFNLKNATTIHF

SEQ ID NO: 852 - protein, 421 aa, Listeria monocytogenes
MTDKKSENQTEKTETKENKGMTRREMLKLSAVAGTGIAVGATGLGTILNVVDQVDKALTPKEKAETGVPFYASNQAGIITAQQTYCYIASFDIQTESRQILQDLFVKWTKFADLTTSGGVLRDVDNDMLPPNDTGEADGLGISNFTVTLGYGPTFFEKDGKDRFGVKAKKPKYLEKIPHMAHDSLDEAYSDGDLCIQVCADDQQVAFHGIRNFIRLASGVAVVRWIEEGFLSAPKNETPRNLFGFKDGTANVDHDSNKGYKDVVWAEKDEPEWMRNGSYLGYRKIQMLIEIWDRSSLLDQEDTFGRKKASGAPYHKKHEHDKVDPSKLPADSHVRLAKDTKQQMHRRAYSYTNGIDKSTGTIDAGLLFICFTQNPAKQFLPMLSIMGKMDKLNEYTVPIGSAMFACQGGLAPGEIFGEKLL

SEQ ID NO: 853 - protein, 386 aa, Listeria monocytogenes
MKKLIIVMLTIFTAVLVVGCSGTGTADKAETKKETTKESKQANAVKKEVKEMKSNLDDVKKAISDKDKSALQSSAAELHKHWLEFENNVRDLYPLQYTDVEKYETPIFYESKNDNPNFDTLNDNATGLDGALDTLEKAKETKAKTSEVLDKAVDNYSKYVTEQVDEFVAQTEIFTNAVKSGDIEKAKAAYVSPRLNYERIEPIAESFGDLDPKIDARINDVENEADWTGFHVIERALWEKKSLEGMDVYADKLLTDAKALQAEVKNLKLEPKPMVAGAMELLNEAATTKITGEEEAYSHTDLDDLNANVEGSKVVYQAIIPALNAQDKKLADQIDAAFNKMEDTLANYKNGDSFVLYTTLTKDQIRDISDQLSHLSELMAQTGKIF

SEQ ID NO: 854 - protein, 482 aa, Listeria monocytogenes
MSHRLLGRVMLLLGALGVILTMSFSYVAAAEKPNIDKPVKGLEQTEKAIVADDYNKAKDAFQEDKLWWSENKQVVKEKSYDLAGQIDRQIAEISLGILNNDKQQAMDGITSLHNLLKTYQDGTYTDNEGNTNITLSSYIAKLTATKKLVDEKEWAKAATQIQDLKTEWLAVEGDVVSQSQAAYDNTERDLMLLDAYINDPAKQAKTADVLDGMTEELKPFADVTYTWFDAALIPFREGLEALLIIATLLTYTKRTKTRTAKRWIIGGTAAGLVVSLALGMIVAFWLSALAFGDNNNLINGWAGLIASIMMLYVSYWLHRNSDITRWNNYMEGKSNQALSNGKMISFAFLAFLAILREGLETVVFLIGMVGRMSNFELLMGILAGLGVLLIIAFVMLRYSVHIPVKPFFMISSAIVFYLCFKFMGSGIHSLQLAGVIPTSVEDYLPSIPALSIYPSWYSFLPQVLLVIFGLTILIKQQIKKKS

SEQ ID NO: 855 - protein, 314 aa, Listeria monocytogenes
MKKSERLNDMMLFLNDKNVFQLSDIMTKYDISRSTAIRDVKSLEEIGMPIYSERGRNGHYQVLRNRLLSPIVFNIDEVFALYFSMLTLKAYETTPFHLSVEKLKTKFERCLSAEKIEMLRKTEEVFSLGYIKHNNQCEFLDVILQFTMEEKVCQINYDKKGIEKTYVVQFYNISSAYGQWYVTSYNFETKRMQVFRCDRILELEENHAFEAKKLTDLKSETDYLYKKKDAINFEVEIASNGVDLFFKENYPSMKLNQEQGRNVIRGFYNRGEEPFIINYLLGFGDKINMVQPDSLKEMLLNELKSLQNHLQKLS

SEQ ID NO: 856 - protein, 205 aa, Listeria monocytogenes
MKNLFLTSSFKDVVPLFTEFESNLQGKTVTFIPTASTVEEVTFYVEAGKKALESLGLLVEELDIATESLGEITTKLRKNDFIYVTGGNTFFLLQELKRTGADKLILEEIAAGKLYIGESAGAVITSPNIAYIQTMDSTKKAVNLTNYDALNLVDFSTLPHYNNTPFKEITQKIVTEYAGKSQIYPISNHEAIFIRGKEVITKRLS

SEQ ID NO: 857 - protein, 244 aa, Listeria monocytogenes
VTEVSMSLTGHLKELRTRLLIILLSFFLAFFVGLFVSKPLILFLQKDDLPKEVILHVFKVTDAFQIYIEMAFVIGLVLVFPVILYQLWAFVKPGLHASEQRITLRYIPITFLLFLFGVVFSYLITFPFILKFMFQFAAELGVETTIGLATYFQFLLQIVLSFGVLFELPMVIMLLTRLSLITPNGMRHSRKYAYFCLLIIAAFIAPPEILSHLMITIPLIGLYEISIVVSGLTVRRMDKEMNNV

SEQ ID NO: 858 - protein, 256 aa, Listeria monocytogenes
MLSTAKERQLKIVNRLKVEQFMRIIDLVEFVNYSEATVKRDLVELEKEGLVRRTRGGAMIIDNKKIDLPYLMKMNERSNETSKIRIADIAKSLIRDDMVIFLDSSSTSLHLIDVLSKFDGLQIITNGVMTASMLSEFTNARVSILGGSILTKRYTVNGAKAYNDALTYNADIAFVSCRGIDYDKGATETHEGEALIKQAFRRQSSSLVLLVTEEKVGHKFMHQSLACHDIDYLITDFKLDPDVEEQFKTHQITCLY

SEQ ID NO: 859 - protein, 286 aa, Listeria monocytogenes
MLYTMKDLLAVGKEHQFAVPAFNICSFDMLKAIMEEVEANNAPVILEIHPDEIEYLGDNFVATVREYAYRSKVPVVIHMDHGGTIKDVMRAIRNGYTSVMIDASRASYEENVALTTQVVELAHKVGVSVEAELGTIGNNGSAEGGADTIIYTDPDQAEDFVSRTGIDTLAVAIGTAHGLYPKDKKPELNMPLLKELNKRLDIPFVLHGGSGNPDKEVSESVQYGVRKVNLSSDLKSVFFEEVRRVLVDNPAMYEPNQVYPSANEKVKDVVRHKLDILNTTGQADKY

SEQ ID NO: 860 - protein, 464 aa, Listeria monocytogenes
MKIVGVTACPTGIAHTYMSAEKLTITAEALGYEVKIETQGAKVENVLTKEDIATADYVILAVDKEIDTSRFAGKKIKKVSTSRAIKEADVVIDETVSGKGLISLEAKSSDVSSEQPSKASLYNHFMNGVNYMLPFVIAGGILIAISFAFGIDASNPDSDSYNALAAAFSKIGGDTAFGLMVPALAAGIAVSVAGRAGFAPGLVAGTLATVGGSGFLGGMIGGILAGYVAHFFANKVNVTKSLASIYQLIVVPLLGITIVGLAMVFIIDTPIAWVLNALTGWLNGLGETSGVVFGLLIGVMMAADMGGPINKSISTFSIGLMSAGVTAPIAACMAAGMVPPLGLALATLLFKNKFTKEEKTAGNSCWVLGASYITEGAIPFAVADPLRVIPSLMLGSATAAAISMGAGVTSMAPHGGIWVMFIPNVINHLFIYLLAIAAGTVVTAISVGLLKTPLNKRKNKEEMI

SEQ ID NO: 861 - protein, 148 aa, Listeria monocytogenes
MNISNLINEDRIIFDNRIQTKQLLFEKVAEVLVKEGSITNSKKFIRDLYNREEETSTGIEAGFGIPHAKSKYVKEPLIVFVHSGIIIDYFGLDDSPIECSFIIGVPKKATDVHLQILSELSRKLMNDEFREKLKNSKNENEIKTILSN

SEQ ID NO: 862 - protein, 338 aa, Listeria monocytogenes
MLKMGFIGNGKSTNRYHLPFILERDNIEVKTIYNRNPKTATWDKIEGVHYTTDLDELLKDPEIQLITISTTQSSHFDYAKMVLENGKNVLVEKPFMMTYAEAKEIFELAKERGLLVQCYQNRRFDSDFLTAQKVIESGKLGELLEVEMHYDYFRPEIPESVHEFKFYDSYLYGHGCHTIDQVLSYFGKPDNIHYDVRQLLGEGRMNDYFDLDLYYGVTKVSVKSSYFRIKARPSFVLYGKKGTFTKETKDRQEEHLKLFYMPSNPDFGIDLPEHYGTLTYVDDAGVWHEEKVISEVGDYGRVYDDLYEAIINGKPKQVTDEETLLQMEILEKGVEACK

SEQ ID NO: 863 - protein, 506 aa, Listeria monocytogenes
MKKRLATTIIMLLSLALIIAGCGNNDTSKSDTAKTKEKEKTEVTSGASKTSYTDPSELKDKYDIVIVGAGGAGMSAALEAKAKGMNPVILEKMPLAGGNTMKASSGMNASETKFQKEEGINDSNDKFYEETLKGGHGTNDKAMLRFFVDNSASAIDWLDSMDIKLNNLTITGGMSEKRTHRPEDGSAVGKYLVDGLLKNVQEQKIPVFVNADVKEITQKDGKVTGVRVKLNNKDEKTISSDAVVVTTGGYGANKDMIEKERPDLKGYVTTNQEGSTGDGIKMIEKLGGTTVDMDQIQVHPTVQQDKSYLIGEAVRGEGAILVSQEGKRFGNELDTRDNVTASINKLPEKSAYLVFDSGVKDRVKAIAQYEEMGFVEEGKTIDELAGKINVPKEELTKTLDTWNASVKNKKDEAFGRTTAMDNDLSKAPYYAIKIGPGIHYTMGGVKINTNTEVLDKDGKPITGLFAAGEVTGGLHGENRIGGNSVAEIIIFGRQAGDKSAEFVKAQ

SEQ ID NO: 864 - protein, 508 aa, Listeria monocytogenes
MTIKKYEPLNLYTNFKKSAERYPEMPIHFDEELVTFPELGLHSTYKKCEEAIIQKAAHLHKFGVRKEEKVIVYKSAKFDSYILAVAISYIGAVPIMVSPHLPASTIDIFVNRLDQPWLLFDSETSDKSHQLNNLPDSRLINAEQLFKAPLDGYTCEQEELPKDMIAYMTHTSGTTGVPKLIAHSANSMGWRTKYQRRILNFIKPRGLVAFHISPVHSRFNIGVSSLMSLGFPLLPIANPSKANVEKVLREYKPYVLETHPNHFVQWASLAREKPDVFQSIKFYHSTFDAINKETMAVFLRTSEYKKPLFLQIYGQSECGPMILRGHTLQSIETLNARDMGIGVPGLTEVRIVDQDGNPVPAGVSGNIQMLSKGRALTYYKEEARFEENVYGPWWDSGDYGMKDEKGRLFLQDRQVDLVETIDSTLAIEDKLLDTLTFLDEVVIIRGENGSPQPIIAVHNDGEMNWDAWWKAVSDLPHMNEPMVMKYDEIPRTATMKVQRLQMERELKK

SEQ ID NO: 865 - protein, 137 aa, Listeria monocytogenes
MDYVITTELPSAEEFVQLRVDAGLSFRAIEASRKALLKSVYFVGLRSKENGKLIGMGRLVGDGIMFIVSDIAVFPSFQGKGFGKVIMTHIKDYIEANLDKTACVTLLADVPAHGLYKQFGFRESAPASIGMIYQVGN

SEQ ID NO: 866 - protein, 254 aa, Listeria monocytogenes
MFPFERQNKIIHLLDQNSKITVPELSRILDVSISTIRNDLSSLEESGMIKKVHGGAVLLKSEEKFTNFNDRIIRNIEEKEAIAKEAATLVKNNQTIILDASSTALALAKELHGFSRLTVITSGLYTAIELKDNPNISVILTGGIVTTNSFTLEGILGANLIENIHADLCFMSAKGFTMEEGLTDFNIYETELKRLLAKRTNKLIALLDHTKMGVISTASITSAENIDLLITDNKINKALYKKFQDAGLPVKVAE

SEQ ID NO: 867 - protein, 143 aa, Listeria monocytogenes
MAENIDDYLEKGMYGAKEINPAEKKKYLGTYRERVLVALTKEEVLTQEYLPELEKAILENSDSKLLLNGLLHYNSLRPYIKLAEKCKHEFSIVTRLEGETDIYLVLACQKAVNKEDIHLYKEAEVEQEEEPISLLEKVRKLFN

SEQ ID NO: 868 - protein, 161 aa, Listeria monocytogenes
VGISNKTNLIIIASGKPKIWDKLPDIGPVKASEVYTGTFHRLSRAYAEQFANEYLILSPKYGFLRPDDIVLKTYDVRFTMKGTGADTIQLGELKEQWQKLQINPTEPIPMLGGKKFRGLLTSITAGKQLFSFPLDGASGIGVMQQNLKQAVETGIPLNRTE

SEQ ID NO: 869 - protein, 175 aa, Listeria monocytogenes
VDNLETDRLILINYTLEMIQATINGTEALEKASGYHVSPDWPGIDFFFYLPYVLENVKKDDRMIKWTRLVVLKEENKIIGEIGGQGNPDETGEIEIGYSIVPDYQNKGYMSEALIGMVAWLEEQSVIRRIFARSYEQNIASIQVLKHNHFVHIKEKDTEEKQGRVMMWEYPIKRT

SEQ ID NO: 870 - protein, 564 aa, Listeria monocytogenes
MRSDKIKKGVEQAPARSLLHATGQIKSPGDMDKPFIAICNSYIDIVPGHVHLRELADVAKEAIREAGGIPFEFNTIGVDDGIAMGHIGMRYSLPSREVIADAAETVINAHWFDGVFYIPNCDKITPGMLLASVRTNVPAIFCSGGPMKAGLSAHGKALTLSSVFEAVGAFKDGSMSQEDFLDMEANACPTCGSCAGMFTANSMNCLMEILGMAVPGNGTTLAVSDARRDLIRESAFHLMDLVKKDIRPRDIITKDAIDDAFALDMAMGGSTNTVLHTLALANEAGIEDYDLERINDIAKRVPYLSKIAPSSSYSMHDVHEAGGVSAIVKELVDLGGAIHPDRITVTGKTIRENVADAKINNTDVIHPKENPYSPVGGLSMLFGNIAPKGAAIKVGGVDPSVQVFKGEAICFSSHDEAVEAIDNHTVREGHVVVIRYEGPKGGPGMPEMLAPTSSIVGRGLGKDVALITDGRFSGATRGIAVGHISPEAAAGGPIALVHDGDIITIDLPNRTLNVDVPDEVLEERRKELPKFKAKVKTGYLARYTALVTSAHTGGILQIPEDLID

SEQ ID NO: 871 - protein, 573 aa, Listeria monocytogenes
VIDTTKTNEKATKKQNKSGAELLIDALKKQQVDMIFGYPGGAVLPLYDAFYDCDIPHILTRHEQGAIHAAEGYARVTGKPGVVVVTSGPGATNVLTGIADAMSDSIPLVIFTGQVHTPGIGKDAFQEADMIGLTIPITKYNYQVRDVRDLPKIVNEAFHIASTGRKGPVVVDIPKDMGIIQTESVRPDTIDLPGYQPTYSPNPLQLEKLMQSLSAASKPLILAGAGVNHARATAELLEFAERYQIPIVNTLLGLGSFPQSHDLFLGMGGMHGSYAANMALTDCDLLINFGSRFDDRLASAPKEFATKATIAHIDIDPAEIGKIIETQIPIVADINETLTQLLQMELPVHPDTSHWYKLNMTRKNRHPFNFDRTKKAEIKPQRVIELIGEITQGEALVSTDVGQHQMWAAQFYPFQFDHQIITSGGLGTMGFGFPAAVGAQLAFPDKTVVAIVGDGGFQMTNQELAILNDYQINVKTVIINNGSLGMVRQWQEKFHGERYSHSIFTSQPDFVKLSEAYGVKGVRLTNPETLEKDLRKAFAHPGPIVIDVHVAKDELVLPMVPSGKPNHQMEGVE

SEQ ID NO: 872 - protein, 163 aa, Listeria monocytogenes
MRRIITATVNNSSGVLNRITGVISRRQYNIDSISVGWTEIPNVSRITIVVHVDSLYEIEQVTKQLNKQIDVLKVSDITDDAHIERELALLKINSPAALRSELNAVIEPFRATVIDVGTKNVVIQVTGTSEKIDAFVDTVRPYGIKQMARTGVTGFTRSPKKMG

SEQ ID NO: 873 - protein, 331 aa, Listeria monocytogenes
MTKVYYEDAVKNNALEGKTVAVIGYGSQGHAHSQNLRDNGNNVIIGIREGKSAESARNDGFDVYSVSEAADKADVIMILLPDETQGETYENEIKPNLKAGNSLVFAHGFNIHFDVINPPSDVDVFLVAPKGPGHLVRRTFVEGGAVPSLFAIYQDATGNARDTALSYAKGIGATRAGVIETTFKEETETDLFGEQAVLCGGATHLIQAGFETLVEAGYQPELAYFEVLHEMKLIVDLMYEGGMEKMRHSISNTAEYGDYVSGPRVVTADTKKAMKEVLTDIQNGNFAKSFINDNKNGFKEFHRMRKEQQGHQIEKVGAELREMMPFVKPQH

SEQ ID NO: 874 - protein, 512 aa, Listeria monocytogenes
MKKIQFFDTTLRDGEQTPGVNFDVKEKIQIALQLEKLGIDVIEAGFPISSPGDFECVKAIAKAIKHCSVTGLARCVEGDIDRAEEALKDAVSPQIHIFLATSDVHMEYKLKMSRAEVLASIKHHISYARQKFEVVQFSPEDATRSDRAFLIEAVQTAIDAGATVINIPDTVGYTNPTEFGQLFQDLRREIKQFDDITFASHCHDDLGMATANALAAIENGARRVEGTINGIGERAGNTALEEVAVALHIRKDFYQAETNIVLNQFKNSSDLISRLSGMPVPRNKAVIGGNAYAHESGIHQDGVLKNPDTYEIITPALVGVDKNSLPLGKLSGKHAFNTRMEEMGYTLTEQEQKDAFKRFKQLADAKKEVTEEDLHALILGQSSESADDFELKHLQVQYVTGGVQGAIVRIEERDGALVEDAATGSGSIEAIYNTINRLMKQDIELTDYRIQAITAGQDAQAEVHVVIKNDKGAEFHGIGIDFDVLTASAKAYLQASGKSKTASKQADFEEVK

SEQ ID NO: 875 - protein, 350 aa, Listeria monocytogenes
VTYKITSLAGDGIGPEIMTSGLQVLEAVAKKYNHTFEIESHPFGGAGIDVAQDPIPSSTLKACQDADAILLGAIGGPKWDNAPKRPEDGLLALRKALGLFANIRPIQVPSSITHLSPLKKEIVENTDFVVVRELTGGLYFGEPKHWDESAAVDSLTYTRAEIERIIEKAFEIAATRNKKVTSVDKANVLASSKLWRKIAEEVASRHPDITLEHLYIDAAAMLMIQRPTTFDVIVTENLFGDILSDEASVITGSLGMLPSASHAENGPSLYEPIHGSAPDIANQNIANPMSMISSVSMMLRQSFSLFKEADAIDAAATRTMQAGFLTADLGGNTTTTDFTNEVLKQIEGGE

SEQ ID NO: 876 - protein, 688 aa, Listeria monocytogenes
MVQFDARNMTLLESLVVANVYLAPENLQEELGISKRTLQYDVEKINKELDNIGLDGIQSVRGQGYYLLEEEKTTIKEILENREASHKVFSASERRIRILFFLLVTDARVIIDTINECNEVSRNTSLQDIKQLKLALKQFNLELAYDRKNGNMVLGDERSIRQFFIHYCMNNEEIATADQLLDLMKINPMIKNQELFPKLDMIFEILAVTEKKIGIRYTDEVIERIGIMIFFFKERMKRNCYLNEKEEHEVESFGIAQEIYQQLQQSENFKINHAEITYLGKLLLGASRLNDDAAAEGKLDLIVEKIIAEFERLACVNFEDHRNLKKDLLLHLQPAYYRLKFQIEWINPLRTDIKQSYSDVYEITKKSLEPLEDLLGEAIPEDEIAYVTILFGGYLSRKNNTLVERKKLLIVCSKGVGTSRMIERQLSQLLGERVEILEPISIREFEKGLYAPDFIVSTLPIMEQKAPVFIVSPILTEAQKQQLMKVIAPHILQKDSDARMLSSVLDVVDQYAKVEDREKLAAKLKSVLFQVQSDSQLEKSPSLDELLPQERIIFKESVTDWQEAIRVASKPLQQEGYISKNYQHAMIENIEKLGPYIVIAPGIALPHASVDDGAYRVGMSLLRLDQPVSFSSKAKDQVKLIIVLASIDSYTHINALSQLTNLIMKHHLLEQIEQATSAAEIAAMLTIK

SEQ ID NO: 877 - protein, 462 aa, Listeria monocytogenes
MGKTLFDKLWNRHVIYGKEGEPQLLYVDLHLIHEVTSPQAFEGLRLENRPLRRPDKTFATMDHNVPTEDIFNIQDLVAKKQIEALQTNCAEFGVTLADMGSDRQGIVHMVGPETGLTQPGKVIVCGDSHTATHGAFGAIGFGIGSSEVEHVFATQTIWQQKPKSMGIEINGKLPKGVYAKDIILHLIATYGVAFGTGYAVEYYGETIRNMSMEERMTICNMAIEGGAKMGMMAPDETTFEYVRGREYAPTDMDKAISDWKTLQTDSDAEYDLHIKMDASILEPYVTWGTNPEMGVPFSKAFPEIKDMNYERAYEYMGLKPGQTAEQIELGYVFIGSCTNARLSDLEEAARIVKGNKVKNNIRALVVPGSRQVRNAAESIGLDKIFIEAGFEWREPGCSMCLGMNPDQVPDGVHCASTSNRNFEGRQGKGARTHLVSPAMAAAAAINGHFIDIRKVAVISGGN

SEQ ID NO: 878 - protein, 193 aa, Listeria monocytogenes
VEEIKVHIGKTVALMNDNIDTDQIIPKSFLKRIERTGFGEFLFDSWRYLPNRKPNPDFPLNALDRQEATILITGENFGCGSSREHAAWALLDYRFRVIIAGSYSDIFYMNCTKNGVLPIVLPREAREKLAKIAAEENVTIDLPNQQVISSVGTYPFEIDATWKNKFINGLDDIAITFEHIDAIKAYEQKVDSI

SEQ ID NO: 879 - protein, 422 aa, Listeria monocytogenes
MELVDLLVTEEDVEKAYEVLKSVVKHTPLEYDFYLSEKYHCNVYLKREDLQRVRSFKLRGAFYAISRLSAEQLEKGVVCASAGNHAQGVAYTCKRMTVPATIFMPTTTPQQKVSQVKFFGGSNVEVVLVGDTFDASATAAKEFAAAHGQTFIPPFDDPDIIAGQGSLAVEMVKDLNKAHEQADYVFAGIGGGGLISGVATYLKAKSPITKIIGVEPDGAPSMTAALKQNQVVTLDKIDKFVDGAAVKEVGSLTFQHAKVLVDEVTTVSEGAVCSTILDMYTKQAIVAEPAGALSVAALETYREEIKDKTVVCIVSGGNNDINRMQEIEERSLLHEGLKHYFIVNFSQRPGALKEFVNDVLGPHDDITKFEYTKKVNRGNGPVIIGVLLQDKNDYEGLLDRVAAFDPSYIPINDNQTLYTLLV

SEQ ID NO: 880 - protein, 239 aa, Listeria monocytogenes
MDAVRKNRLFQHSTMAALVGGLFSGTTSFKELLQHGDLGIGTLDQFDGELIILDGEAFQIRSDGQAYKVKPEDTTPYASTTFFDADTSFSVSEPTSKQAVEEKIAELVQGPNVFYAVKMTGNFRYVDTRVVPKQQRPYPPLIEAVKEQPTYHFEYITGTIVGFWTPAYISGIGVSGYHVHFIDDMRKIGGHVFDYEMLEGTVEVAQQTEFELQLPQTTEFLRSDLSTPDMLEQIEAAEN

SEQ ID NO: 881 - protein, 433 aa, Listeria monocytogenes
MRMVDIISKKRDGKALSTEEIQFFIDGYTNGEIPDYQASALAMAIFFQDMNDQERADLTMAMVGSGDTIDLSEIEGIKVDKHSTGGVGDTTTLVLAPLVAAVGVPVAKMSGRGLGHTGGTIDKLESIEGFHIELDKKDFIDLVNRDKVAVIGQSGNLTPADKKMYALRDVTGTVNSIPLIASSIMSKKIAAGADAIVLDVKTGAGAFMKTDEDAENLAHAMVRIGNNVGRNTMAVISDMSQPLGEAIGNALEVKEAIDTLKGQGPEDLTELVLVLGSQMVVLAKQAETLDEARAKLIEVIENGAALEKFKTFLSNQGGDASIVDHPEKLPQAKYQIEVPAKTSGFVSQIVADEIGIAAMILGAGRATKEDEINLAVGLMLRKKVGDAVKEGESLVTIFADQEDVENVKAKIYENIQISDHAIAPTLVHKVITE

SEQ ID NO: 882 - protein, 336 aa, Listeria monocytogenes
MAATIREIAEKTGVSITTISQILNGKGERFSDLTREKVLKTAKEMSYKPNFFAKNMIVSHTNTIGMIVPEVTDPFFSQMVKGAEDYLNKEGYMIMLCNSSNDKEREDLYVEELLHRAVDGLIIASPNILLSGVIKRMEEKRSPYILLDRQRNPRQEGNIAIDDFKGGYMATEHLIELGHTRIGIIISDTSFYNVHERYEGYLACMKDYQLPVKDSWIVSGDQTMNGGYIATQKLLQENLSAIFATNDLMAMGTYRAALEKNLRIPHDLSVIGFDDIELSEYMTPPLTTIRQPIYGIGEIAAELLLKNLQNPTEKLENRLLDISLIKRSSTKSIDNQ

SEQ ID NO: 883 - protein, 866 aa, Listeria monocytogenes
MAIKENAAQEVLEVQKVIDRLADNGQKALKAFESYNQEQVDNIVHAMALAGLDQHMPLAKLAVEETGRGLYEDKCIKNIFATEYIWNNIKNNKTVGVINEDLQTGVIEIAEPVGVVAGVTPVTNPTSTTLFKAIIAIKTRNPIIFAFHPSAQRCSSAAAKVVYDAAIAAGAPEHCIQWVEKPSLEATKQLMNHDKVALVLATGGAGMVKSAYSTGKPALGVGPGNVPAYIDKTAKIKRSVNDIILSKSFDQGMICASEQAVIVDKEVAKEVKAEMEANNCYFVKGAEFKKLESYVINPEKGTLNPDVVGKSPAWIANQAGFKVPEDTKILVAEIKGVGDKYPLSHEKLSPVLAFIEAANQAEAFDRCEEMLVYGGLGHSAVIHSTDKEVQKAFGIRMKACRIIVNAPSAQGGIGDIYNGFIPSLTLGCGSYGKNSVSQNVSATNLLNVKRIADRRNNMQWFKLPPKIFFEKYSTQYLQKMEGVERVFIVTDPGMVQFKYVDVVIEHLKKRGNDVSYQVFADVEPDPSDVTVYKGAELMKDFKPDTIIALGGGSAMDAAKGMWLFYEHPEASFFGLKQKFLDIRKRTFKYPKLGGKAKFVAIPTTSGTGSEVTPFAVITDKENNIKYPLADYELTPDVAIVDAQYVTTVPAHITADTGMDVLTHAIESYVSVMASDYTRGLSIRAIELVFENLRESVLTGDPDAREKMHNASALAGMAFANAFLGINHSLAHKIGPEFHIPHGRANAILMPHVIRYNALKPKKHALFPRYESFRADEDYARISRIIGFPAATTEEGVKSLVDEIIKLGKDVGIDMSLKGQNVAKKDLDAVVDTLADRAFMDQCTTANPKQPLVSELKEIYLEAYKGV

SEQ ID NO: 884 - protein, 142 aa, Listeria monocytogenes
MIQATVPYFTFDGEATEALDFYKKVFQAEITQMHYFHETEGFSGDKKQGERILHARLAKDEKDLFYFSDTVEGETDAGNRLALAVNFSSEAEFVQAFILLSKTGTVEIPIQNTFWGAKYAKVIDHYSIDWHLNLENESTTKV

SEQ ID NO: 885 - protein, 306 aa, Listeria monocytogenes
MTETVLKLEHVTKKIGQKNIVHDISFDIHKGEVFGLLGPNGAGKTTIIRSIVGLIRRSEGTVFINGKNVDTEYKAAISEVGAIIENPEFYMYMSGWANLKQFARMSQKNITDEHIREIVELVKLTGAINQKVKTYSLGMRQRLGVAQALIHSPALLILDEPTNGLDPQGMAEFRTLIRDLATNGTSVLISSHLLSEIQQITDRFAIINKGVLTHIEKMSDLIENHVAAYKLKVSDPVATTTVLATLPVKLVAQNEDLFKIEVAHEDVHLIARALIQANIDLLEMVPLQASLEERFLELTKSGGAEV

SEQ ID NO: 886 - protein, 355 aa, Listeria monocytogenes
MIALVKNEFTKLFSRKSSWIMQIVLFVAVLALALLMFFVSKIDTSGVEGGDASNAGITAYYDDKGAPVSEEEYWNSADKDGTPTYKSETLSLTDSVAYLKTQEQAAPTKEAKETIQKQIDFYQAYVDADEKPASNSAGISSADFFASLGSSGAVATMLVVVVASIIVATEFSGGTIKLLLTRPYSRSQILFSKYVMCIVYSIISSITLLVASFIFSFILPKQSIFMPLSPSTGAMTAFEHAWMLLGTNFLLMIVYATIAFFFSSVVRSQALAVGVGVGVLFSGGIIRQLLPLAIEKYDWMKWIIFNLLSLNDTVGGSKIAGGLADWQIIAGLGVYTAIILFFTFFLFKKRDVALS

SEQ ID NO: 887 - protein, 324 aa, Listeria monocytogenes
VIPAKLKQGDEIRIIAPSRSIGIMADNQVEIAVNRLTDMGFKVTFGEHVAEMDCMMSSSIRSRVADIHEAFNDSSVKAILTVIGGFNSNQLLPYLDYDLISENPKILCGFSDITALATAIYTQTELITYSGAHFSSFSMEKGLDYVMESFSDCLLQKEPFALKESATWSDDEWYLDQENRNFIPNEGLVVMQPGVAEGIIIGGNLCTLNLLQGTEYMPNLAGTILFIEDDFMTIPETFDRDLESLLSQPGADEIEGMVIGRFQQKTAMTAEKLAYIIETKTALQKIPVISGADFGHTQPIATFPIGGTARIDTNQTDKIQIIRH

SEQ ID NO: 888 - protein, 193 aa, Listeria monocytogenes
LSEELRCPWSINDPFELEYHDTEWCVPSKDDTYLFEMLNLEGAQAGLSWRLILHKRKAYQEAFFHFDIDKCALLTDDELATIVEEAAIVKNRLKVKAVRTNALATQKVQAEFGSFANYIWGFTNNERIINKWQGMGQVPASTELSEKISKDLKKRGFKFVGPVIIYSYLQAIGILDDHLLSCPFHTLNREATK

SEQ ID NO: 889 - protein, 77 aa, Listeria monocytogenes
MRYQKISFIVTGIIAVVVGYLIFTSNYRPDVPNWLLFLFLALSIAVAVSQWREKRLIWSCIGLFVAILISVHYILTI

SEQ ID NO: 890 - protein, 900 aa, Listeria monocytogenes
MTNWKEKARASFQLNDKTYHYYKLKTLEEDKLTNIEKLPYSVRVLLESVLRQADGRVIKDSHVEDLAHWSKDGNEGEVPFKPARVILQDFTGVPAVVDLASLRKAMADLGGDPEKINPEIPVDLVVDHSVQVDSYANPEALKINMELEFKRNMERYQFLNWAQKAFDNYRAVPPATGIVHQVNLEYLANVVIANEVADGEFVAFPDSLVGTDSHTTMINGIGVLGWGVGGIEAEAGMLGQPSYFPIPEVIGVKLLGALPNGATATDFALKVTQVLREQKVVGKFVEFYGPGVATLPLADRATVANMAPEYGATCGFFPVDKEALNYLKLTGRDKEQIELVEAYLEANDLFFTPEKVEPNYTQTVEIDLSAIEPNLAGPKRPQDLIPLSKMKETFRESITAKAGNQGFGLDKSALDKEVTVTFGNGDQSTMKTGSVAIAAITSCTNTSNPYVMLSAGLVAKKAVEKGLEVPKFVKTSLAPGSKVVTGYLEKAGLLPYLEKLGFDLVGYGCTTCIGNSGPLKEEIEEAIQDSDLLVSAVLSGNRNFEGRIHALVKANFLASPPLVVAYALAGTTNVDMLTEPIGRGNNGEEVFLDDIWPSSEEVKALVEETVTPELFREQYAHVFDENEAWNAIETTEDALYKWDENSTYIANPPFFDNLAKEAGKVEALSGLRIIGKFGDSVTTDHISPAGAIGKDTPAGKFLQEQGVAIRDFNSYGSRRGHHDVMMRGTFANIRIKNQIAPGTEGGYTTYWPTGEVMSIYDASRKYIENNTGLVILAGDDYGMGSSRDWAAKGTNLLGIKTVIAKSYERIHRSNLVMMGVLPLQFQPGEDAETLGLTGSESLQVEIGEDVAPRDLVKVTATREDGSSITFDALARFDSEVEIDYYRHGGILPMVLRGKLK

SEQ ID NO: 891 - protein, 267 aa, Listeria monocytogenes
MQIKEFLISRRSELVNMFYENYYSETDEFKLRLSSGEEEVSIRALSTASCGMIIDVITGVKKRDFESIGKRRFNDKTDIRKIHQHMSEVEKYIITSLVKWKETENVFYSDADIIQFMLAIKDTLSSIQQQLLEGFMQENRNQVAAQRKEIIQLSTRIIPITDSIGVLPIVGSLDDDRGYFMKEKAVESADKLNLDTIVIDFSSAVLKDDFATKHMEDMIQSFKLIGLVPILSGMRPSFAQRTIQVGSNISKLESFGSLEQALTNLGV

SEQ ID NO: 892 - protein, 140 aa, Listeria monocytogenes
MKKWEVFAVQNVEAAEEIINKLVSEGYEKEDISVLAKSKHNKNLETLAEKENIEIERPVNEEAFGIISGILQSLSGAIVIPQAYNPKYGALYAAGPFAKWFSKTDDKSVKRLLEDFDLTEKQVDKMIENLHADNILIFAR

SEQ ID NO: 893 - protein, 1072 aa, Listeria monocytogenes
MEHFTAIQNKMIPYSVKQAGKKLMEDGEIIQFREKDAADHFLTYFIDQNVVEDAGNENYACSCADFQLNAICKHIYATHLKMEKEKQKAAKQDFKNRILTQESNTLLSLFQQNMAQQLEVEEDNTNKTPLQTQYIIRLKPDDSSYIMTIEVKVGTERTYVVKNMNTFLAAIRDRQWLVFTKNFAYDPNEHFFLEEDKQILDKLLQISEIAKMYDTDSFYWSKSYAEEKNLTIPPSMASDLLELLTERDTTCIIMKERVEDIKYRGINVRHDNLDFIFELKKSADDKYQLEMEDLQQAIFFEAYQLLFFDGTFFIPAKEVWESLKPLMEFHKVTKNEVVQFSESQLSEVISYVLPALQKSGKLKLDDSIEDRITQQPLDCKLFIALEYGEHTLRLEYHYGNQLFDPFATSEEENEKIMIRDVEKEARVMNIIESAPVHFSGTKMVVNKQEKDLYQFYYRTIPKLAEYAEIYMEDGLEEMVEENVRPVTTLDVSGDNDYLSVSFDFKGIPEEEVQNVLESLREKRSYHRLKSGRFLSLESENYKQMEDVLQMLEVRKKDVQANMQVPLYRGMQIYDILGAGTQDEHHKFSRSFRELLTDITTQSEDSFALPKGLKAELRDYQLTGFEWMKSLAKYNLGGILADDMGLGKTVQTISFLASELEDNPNLKPVLIITPASLLYNWQSELEKFAPAIPVTVLHGTKQSRMAEMEEMKRGHVYLISYPSLRQDIVHFADVAFSSVIIDESQAIKNYHTKASQAVRALKRNHVFALSGTPLENSIDELWAIFQTLMPGFFPSLRKFKEIPYDNIAKMIRPFLLRRLKQDVVKELPDKIETNLYSELTDEQKTIYLAYLEKIQADLEASNGNAGEERIKLLAGLTRLRQICCDPSLFVENYQGESGKLLQLFDTIQTARENGKRILLFSQFTGMLGIIRQKLEEEGQPLFYMDGKTPSKTRLDMVNAFNEGENDIFLISLKAGGTGLNLVGADTVILYDLWWNPAVEEQATGRAHRIGQKRVVQVFRMITKGTIEERIFELQKKKQALVDELIQPGEQMLGKLSTEEIKQILQLDNGRDDK

SEQ ID NO: 894 - protein, 1023 aa, Listeria monocytogenes
MRPIKLTMQAFGAYAKKEVIDFEKLGTEQIFVISGKTGAGKSTIFDAISFAIFGKANTFDRESFSMRSHFATDKEITEVTLAFRLKDKIYQISRIPQQEIAKQRGNGTTTSPQKAELYELIGDEMKLLASSVRDVNTKMEELIQLNVDQFRQILMIPQGEFRELLVSDSKEKEVILQRLAHTVYYEKVENLLWEKQKQAEILVVEARKKVAELAELSLPDVEVSGKTTSEISVLQDEAIQKEQVILTELENKLSIMRKQTSEAVEKVTLAKEQLLDWQNLDKYTEEVATLEAEKDFYQSMEVRMNAAKRASNLQSQDALCIRLKEQLEAAEQTEKQVVVEAEQVKTQFLHAKKQKEALAEKEAELEINKRTLFQLEEMEPKILELETVSIQKRRAELDWKETTTLLEKIIDKEQKIATELQSVEARLAEINKAELTYLEAINKRTTLEARVEKEQELVNKRMKMEEWDAAKQTEEQTLAQLLIEKAEMERTIKQEEIKLEKEQAATIAAHLHEGDACPVCGSQSHPVLAKFGETADLETLEIAKAKLQEKQLVITTTEKAISQLEWQLNEWADMKEQSLAEIQQTLAGNIQLATNLREQITQLQSEVAQKETVQATLESLKNKQNETLTEKNKMALEVEKLHQQVQLTEGKRTYLEQSIPDELRDKAVFDNKMKELSSKIETHIKQAEQIDALFRQAEKETTRLESTLHSAQKTTVDAKEALQVQREIFKEAMKQNDFLSYDAYKQALLSVDELKNLEGKLAEYEQKRHLAVSRQADLKEKLQNKQKPNMEQLEFIMKEKQLELSQSEENTMKQREFVAKRKELVENYQNSIQAVEQAEENYADIGLLADAARGKNARRLTFERYILAMFLDTIIHRANHRLSKMTSGRFELQRKMEKAKGNVQSGLELEVFDEYTGLTRHVKTLSGGESFKTSLALALSLAEVVQEMAGGISLETMFIDEGFGTLDPESLEAAVECLLETQENGRLVGIISHVPELKERISARLEVTATNHGSTTKFITASS

SEQ ID NO: 895 - protein, 374 aa, Listeria monocytogenes
MKFLHTADLHLGKIVSGVSMLAEQEYILTQITQIAEEEQVDALILAGDLYDRAVPPADAVKVLNDILVKWNVELGIPIFAISGNHDSAERLAFGSQWYESSKLYMKGKCTSQFDGIPFMDAEVWLVPYHEPAIIRQAFADNSIRSFEDAMQAVTKQIRSKWDTSKAQILVGHAFVSGGIPSDSERQLAIGNVDRVSTDCFDGFTYTALGHLHHPHAIRHPSIFYSGSPLKYSFSEANDHKSVRIVELEGKELISVTERFLTPKHDMRIISGTLAELTENLVENPDDFFQVNLMDEGALIDPMGKLRQFYPNILHLERKKQTLKETQDSFEEIMKKDDLELFGQFFEHVNGTELTETQKQKLADVFEQARKEDAE

SEQ ID NO: 896 - protein, 202 aa, Listeria monocytogenes
LFYHFAKNLVHFILIIIGGRFQVQNKDKIIEAPYVVVSTHTSWIEILYLGFALSPTPVHYMAKQELFKGKFLNWLMTHLNAFPVNRDNPGPSAIKAPIRMLKSGKVVGIFPSGTRKTTNLHLKRGAVTIAHKAKVPMLPAVYDGPKTFGEILKRKKIIIRFGDPVLFNDTELDQKELLEVKSQELMATFEQLQNEINQTKNK

SEQ ID NO: 897 - protein, 120 aa, Listeria monocytogenes
MGAWGFDPWDSDEAADWFGEFMKHVDIDFIIQTVEEVENNEYDYERIRAVSYIVEMLGKSYIWPVDYYEDLDKMVEKLINLLTLMIEPDSDFLDMWGNNPEIIIAVQKQIDVLKKRQQGK

SEQ ID NO: 898 - protein, 171 aa, Listeria monocytogenes
LKKWLLVVLTLALGLSLAACSGSNSSDKKEDTKKETTSDKDKVLNYYMDLVDVVNENNGDYNAYVGAVGADPKPSEADLAALAKPASESALKVSEALASEKTPDLGKSTDDFKAAVKQLSDAYKLEADALKASGRDTTKADEAMAKADEAIASVLKDAGLNPSSITTDTAS

SEQ ID NO: 899 - protein, 162 aa, Listeria monocytogenes
VSLIISIIITLVFGAGIIMIRMKASKRPASVKGIIIPPIMMSTGALMFVIPFFRVSWVDILEAIAMGLVFSVILIWTTKFEIRHKYVFIKRTKAFPVILMGLLLIRIFIKYWISGSLEVGELSGMFWIMAFAMIVPWRIVMYFQYKNTEKELNKVEVSGEYE

SEQ ID NO: 900 - protein, 601 aa, Listeria monocytogenes
MEAMNEQDEMLVMSGKEHREVLKRMLSYTKYHIPSLIWTGVLVLLVTLADVFAPILIKIFLDDYLTPMNLEMQALLILGAGYLGLTIGKSVVWYFQLLFFQKIALEIVQQMRIDIFTKLHSLGMRYFDKTPAGSIVSRVTNDTEAVKDMFINVLSTAIQSLFMLVGIYAAMFALNVQLALYSLLLFPLIVFIIFVYRKYSSQFYRARREKLSQLNAKIAESISGMSIVQQFNQERRLVKEFEKINKDYYDVGMKNIKFNALLLGPAIDLIYALAVVIILSFFGAESLIGPVAIGTIYAFISYFDRFLEAIYNVMERLAMYQEAITAASRVFRIMDETEEVPAQLNDPEAKITRAKIEFKDVSFAYEGGRDVLKNISFTAEPGQTVALVGHTGSGKSSIINLMMRFYEFERGDILIDGKSIKSHEITELRKKTGLVLQDSFMFYGDINTNIRLYDKSITDEQIVDAAKFVQADGFIQTLSDEYNHKVIERGASFSSGQRQLISFARTVVTNPQILVLDEATANIDTETESLIQTGLKRMREGRTTIAIAHRLSTIKDADLILVLSKGRIIERGTHDSLIAEEGVYHSMYQLQNSGMDLDEAL

SEQ ID NO: 901 - protein, 589 aa, Listeria monocytogenes
LKIYKALGWFFKENWKSYAFGVTILFTIALLQLVPPQIIGYTVDAVTNDSLTKDKLIKWMIILVVAAILAYGGRYVWRMLIFGSDNKLQRTLRLRLFEHFTKMSPFFFQRYRTGDLMAHATNDITAIQQVAGIGVLTLSDSVLTGGTVIATMAITIDWRLTLIALLPMPFMVLGSSILGKKLHDRFHGAQAAFSMLNDKTQESISGIKVTRTFGQEKEDIQDFAKQTKEVVQKNISVAKVDAMFDPMISIIVGVSFVLSLGFGAKFVVDGELTIGQVIAFSNYLFLLIWPMLAFGFLYNIIQRGNASYDRVQHLLAEKEDVLDQEGALDTVPVGDLQVTMDKFTYPDESEPVLADIHFNLKAGETLGIVGRTGSGKTSLLKLLMREYDTYEGKIAFANVKIQDYTVRALREAIGYVPQDQFLFSTTVRDNIRFGKPDAPQEEVTKIAKLVSVDEDILGFENGYDTIVGERGVSLSGGQKQRLAIARALIMNPELLILDDALSAVDAKTEEQILANLKENRSDKTTIISAHRLSSVEHANLIIVIDKGRIVERGTHMELMALDGWYAEMFREQQLEEALEEGGVADGSDE

SEQ ID NO: 902 - protein, 174 aa, Listeria monocytogenes
MNKIIIYSSQYGTSKQYATELSQKKAIPMYSVESIPESIVEADEIIYVGSIYMGKVLGFDKFSKKYKTLSSKLIVISAGMYDPTRKENTDNIELTVKENLQKTNFLLKDIFCLKGKLDTQQLRLKHKILVNALYKSAKRKKESDLNDNERDIVRAYEDDSQIDLNKLDGVLDRL

SEQ ID NO: 903 - protein, 249 aa, Listeria monocytogenes
MPQVRDLSVIDVPGGCVLTSCDISAGFGEKTHDGLMVAPEVTARLTLRVALIEMIASGAEVVAVSDVVGGEMEPTGRRVIVGLKDELTKANLSHIELNGSTEENMKVTQTSVGVLVTGFATKAALKLINVHEAAVLFAFGEPIVGAEVLQKLRDMPDYRLVKKLVEHNDVLEVVPVGSKGMAYEAHLLARLNGGIFVPSDTFSEAVMNKTAGPASVILAAVKEDNVTAFEREFLGAKRIGLLRGNEEWT

SEQ ID NO: 904 - protein, 122 aa, Listeria monocytogenes
MDSAHSQLEQQLQQIKKAKITAETDADQTRRKQNEQDWLEEDSNQLTQEKRVLLDFLRSGWQGEEASSFHRYLEEQQHEESQVWRRDLQDKRSDLDTELQENKDRLHTLEAKQATLQKEWSQ

SEQ ID NO: 905 - protein, 491 aa, Listeria monocytogenes
MSRIDIAELNDFLHGLRSSNAEAKAMIRKIKEAAMDYAQDNRLKGEAVSTSKQYFSSTYTSICQSIIEALDESEERLAQYIREFGSQVDSSPSARIDAEILQEAMAKVSQLQRKEEDLHRQLTAPNTKPDMQQVYAVKSRSVHTQLLKAIEQENILEKYLAFEQSHGQFFSALDELIRATARAVQELLHHVSFNDKTGTYSVPKSAANSLLLMKKARDKARKENDKDPYPKAFEDYTVLAYTYVNDQGETVTMWLLEKDGKRVENKELQDFLEKHGQELDPLLYTNLSGEELERKVNDSWKEGINYLNGQKVSGVSGATLRSSAYVASMKDWTDDAGLTDMALGLGFGIAAARNKPVIKEKLNPAETKQTVNGEKWNNYFKEKYGAGNVQWKPSSFEDIIINPERLYGSTKKEVRQMLGEGWKEETYGSAGNGWKFTNEGDGMVFYHPGEGIHKGSYYGFSSGDTGKVKIVGKDYIDFSKDKATIIKFGGE

SEQ ID NO: 906 - protein, 126 aa, Listeria monocytogenes
LKKLTVGGKFDWYIDTLEKSGMFILELSNEEIETFIFEDFIVGVTSFFSKNNLSELKANEIIDEDMEKNAYLLREKVLKIDNTDLWNINSVRQSSEWLDIFRRSDELKRQLKERWSDEEIEYLKTL

SEQ ID NO: 907 - protein, 123 aa, Listeria monocytogenes
MVSRKQSIQKTQLSKTKKQTLNVTIDRPIGYTDKFGNVYPLNYGFVEGVIGGDGEEQDVYVLSRKISEPIDTFQGDLIAVITRNDDVEDKWVVAAPNENFTIEEIREKVHFIEQYFDSEIKLI

SEQ ID NO: 908 - protein, 110 aa, Listeria monocytogenes
MKKNTPEALIDLFEELKNLFETDTSLNNQNSSRLQEILTTATIRVRKASQTVELEARSVFQNIHTLCFVEKIHLNPEEANVLKEIEKIALSKGFWGGMNTLNVTNQFPSN

SEQ ID NO: 909 - protein, 665 aa, Listeria monocytogenes
MSRIDEQMVNSIRVLSMDMIEKANSGHPGLPMGAAPMAFSLWKNHLKFNPEHPTWFNRDRFVLSAGHGSAMLYSLLHLFGYDLPMSELKNFRQTGSKTPGHPEFGHTVGVDATTGPLGQGFAMGVGMAMAEAHLGAKFNQPEFPVVDHNTYVLCGDGCLMEGISYEAASLAGHLKLGKLVVLYDSNDISLDGDLNESFSEDIELRFRAAGWQTLRVDDGNDLDALDAAIHLAKTEKSRPTLIEVKTVIGYGSPGKAGKSAAHGSPLGEKELKLAKEAYDWQMPPFELPKTVENQKEFYHSKGRASESSWLRTFNAYKQKYPALAESLQHLMDDNLTADWDAELPVFDENADKPVATREVSGIILQELEKKLPNLFGGAADLASSNKTHLKASERFAPGNYAAKNISFGVREFAMGAAVNGMTLHGGVQAFGATFFVFSDYLRSAIRSAALMGIPSTFIMTHDSIAVGEDGPTHEPIEHLASFRAMPGLHVIRPADGNETVEAYRFAFTQKEQPTMLVLSRQNLPILPNSAAKAKTGLAKGAYILADSPLDKLDIILLASGSEVHLMTAVRDNLAKKGFGARVVSMPSFDLFDKQSPEYKESILPKAVKKRFAAEMGASYGWHKYLGDSGEILAIDSFGMSGPGDELAERFGFTVENLTELALKQL

SEQ ID NO: 910 - protein, 218 aa, Listeria monocytogenes
MKFFLDTASVSEIKRISELGLVDGVTTNPTIIAKEGRPFEEVIKEICSIVDGPVSAEVIGLEADKMVEEARILAKWAPNVVVKIPMTEEGLKAVHTLTAEGIKTNVTLIFTVSQGLMAAKAGATYISPFLGRLDDIGTDGMILIKNLKKVLDNYGLKAEIISASIRHIGHLEEAAEAGAHIATIPGSLFPKLWSHPLTDKGIEGFLKDWEAFSQKEGN

SEQ ID NO: 911 - protein, 143 aa, Listeria monocytogenes
LKKMMVMGSVGCGKTTLCQKLHGYDILYKKTQAVEYFQEMIDTPGEFVQHRQLYSALTVTAADASVIAILQSVTEKKQTFSPMFASIFAKPVIGIVTKVDLAESDKDIERAERELRMAGAKHIFYISSVEETGIEELRAYLED

SEQ ID NO: 912 - protein, 254 aa, Listeria monocytogenes
MTFKGFDKDFNITDKVAVVTGAASGIGKAMAELFSEKGAYVVLLDIKEDVKDVAAKINPSRTLALQVDITKKENIEKVVAEIKKVYPKIDILANSAGVALLEKAEDLPEEYWDKTMELNLKGSFLMAQIIGREMIATGGGKIVNMASQASVIALDKHVAYCASKAAIVSMTQVLAMEWAPYNINVNAISPTVILTELGKKAWAGQVGEDMKKLIPAGRFGYPEEVAACALFLVSDAASLITGENLIIDGGYTIK

SEQ ID NO: 913 - protein, 148 aa, Listeria monocytogenes
MKIAIGCDEMGYELKQTLITRLKEKNIEFTDFGSFEDEKVLYPSIAEKVALEVKNNDYDRGILICGTGIGMAITANKIHGIRAAQIHDSYSAERARKSNDAHIMTMGALVIGPSLAVSLLDTWLDSDFSGGRSQAKVDLMEEIDQKNR

SEQ ID NO: 914 - protein, 254 aa, Listeria monocytogenes
MRKPLVGINMKNYINTRAQTSEWLEATIPLLGNFSDVDTFIFPSMGTLETTANLLAGTSFGFGPQNMAPEKSGPLTGEFSVESIIDLSANYVEIGHAERKNLFHEKTSEIAKKIQLALDEKITPVVCVGEGIRANDTNELKNALKKQIEALFDTIQVTQFKNVVLAYEPEWAIGKANSADTDYIESAHQALREIIRELGGDETLVRIIYGGSVSKENAAEIVRQKNVDGLFVGRFGHKPQNFADIVSIVSKTKG

SEQ ID NO: 915 - protein, 216 aa, Listeria monocytogenes
MSELVMDSAFFGHVLQDMGALIEKERDYLTGLDSDIGDGDHGINLSIGFREVNKQLDELLAVSPDIATLLKKSGMILLGKVGGASGPLYGSFFMKCGADIPGKTEVNFDELCGMIINGAAAVQHRGKAELGDKTMMDAFLPGVEVLQNRDANAEPIETFSTFVDAMHAGAQSTIPLIAKKGRALRLGERAIGHLDPGSESSWMLMNIILENLKKAV

SEQ ID NO: 916 - protein, 331 aa, Listeria monocytogenes
MRRLVNDGYEAVEEMLAGYVAAQGKYVDFAENDKRVIVSKQMSEEPRVRIIVGGGSGHEPLFLGYVGKDFADAAVVGNINTSPSPEPCYNAVKAVDSGKGCLYMYGNYAGDVMNFDMGAEMAADDGIRVETVLVTDDIYSAEKVEDRRGVAGDLIVFKAAASAAAKGLDLDAVKQAAEKANANTFSMGVALSSSTLPVTGKAIFEMKEGEMEVGMGIHGEPGIKRTSIEPADKVVDQIMGYLIEEMKLTSDEEVHVLINGLGGLPVMDQYICYRRVDEILKEKGVHIHNPLVGNYATSMDMIGMSITLVRLDDELKDLLDTPCDTPYFKVD

SEQ ID NO: 917 - protein, 113 aa, Listeria monocytogenes
MSIGIALATIAGGFLFPFAIRMMWGKMVDEWGAIGGWMAAAFIVGTVWTINHGIPKSMIYQSGTVWVDMAVAAGIGVFTASLLTGGKFSKSIVNLAAAVVGGVVGGFLLSLFL

SEQ ID NO: 918 - protein, 143 aa, Listeria monocytogenes
MKFFRGMIGFCIAGMIVMSVWTPLAENYGIFGGYLAAFIIIGPMWFMNHYVGLIENDEDAAFVDMAVGIGICGIMRDVFMQGGGELVSSLPTIGLVAIGAVLAGIVAAAIEKDMAKKQEAKQEKTEPGMNMKEEERLNENQLV

SEQ ID NO: 919 - protein, 125 aa, Listeria monocytogenes
MISIVLVSHSQKITEGLQEMIVEMVGDTVHIISSGGTGDGRLGTNAIMIADNIATCTNSEHIYIFCDIGSAILSAETALELLDTDLLEKTTIIDAPLVEGAFTAAVQSLVNPSKEAILQELTNVH

SEQ ID NO: 920 - protein, 116 aa, Listeria monocytogenes
MSFDDNKERVIQEYVPGKQVTLAHLIANPNRDIYTKLGLEEGASAIGILTITPSEASIIASDIATKSGDVRIGFIDRFSGSVVLTGDVSSVESALQQVVFSLHEILDFSIPKITRS

SEQ ID NO: 921 - protein, 604 aa, Listeria monocytogenes
MKEVNYREDDWREAKSALAPFAAANWVGGLFNNLEKVSKNMEEAEEDVQELDSDHAISFQHTNYRGKYSAIEDDLMVLYKFSCHAGEKMETLVDQPFYEKLDAFVDGMQDLSISTYSTTNRIGAKSKQTYTTTSGGSQVIESIKEGATIEDLMNGDNFYANQMQLQYRDWQRANPDQDVSKKDFQMGMLHSRAFEYKSIKDEQQEKEFWVNIVATVVIVGVSIFCPPAGLALAVGYGSLEAGSAISGKDWVSGRELSTEERALRGGLALLDIVPGVKALSTGAKAASAGSKLVRVGDNVLAGSKNVGKGTIDNGIQAGKQAMDLRLANAKKVSEAVQKKLTKDLDDIGTMAKTIQNKTKETFTLPPREQLAFARGGSIPEQSATGAAAIAAKKKLKDIMQNMDNLNVKGGGKDDIIEQNKSLKFTSLEESEKWGIDGFSVWRNSLSSREIQAIRDYTDIWHYGNMNGYLRGSVEKLAPDNAERIKNLSSALEKAELPDNIILYRGTSSEILDNFLDLKNLNYQNLVGKTIEEKGFMSTTTISNQTFSGNVTMKINAPKGSKGAYLAHFSETPEEAEVLFNIGQKMLIKEVTELNGKIEIIVDLL

SEQ ID NO: 922 - protein, 110 aa, Listeria monocytogenes
MAQQTMGGAGAASTIDINPDEMTHIAKELLAIANEFEGVIKPAVNQLKANKYLTKGKAKKAMDKVPKANERVMELQDQYNMASSVVFDILQTMVDADRDIAEKIIAALEV

SEQ ID NO: 923 - protein, 233 aa, Listeria monocytogenes
MTVETIDVFSPVELYLLLSPIEAQHLFGVPDKLTFLLKGEDVFAEGFDRLKSKGILNEAGELTDGGGFLIDSLIEYYQSKKYVRMNQLMFAFLEKTPNELLVMIEITPQKEYRFERMNKIYALEMIKDFFPLIRREPGERETEFLKEELTNEERKRATAFDPEKNFISMEFFHVDEEPKEKNNAKYYKQYLAFEMEDKLMMVDVVNDTYYRGSQYALLKLLFDELEFPYEEAK

SEQ ID NO: 924 - protein, 99 aa, Listeria monocytogenes
MGNVKIDAAKVAEAKKSAAIVEKSLESTHKKCKSVISYVEGASWSGKSRDAFLTFMELIEKYHADVKKNYKKQKKALTALEDYVEDFENTSYSKDVKRL

SEQ ID NO: 925 - protein, 131 aa, Listeria monocytogenes
MGLTDFWKTPTEKKRDEYDKLHDYLKDALKKHDEKMAEVKSDLSAYKKGMPDMPSKGIPANPFVEKNEKVLEQLEKYIDKEKDKRASLKSAIDTAYRKYLEYKALAIKEEKAEQAKKEKEKKEREERLKNG

SEQ ID NO: 926 - protein, 184 aa, Listeria monocytogenes
MKMDTLGFLELNSISKGIEAVDTMLKAANSELIYAKASCPGKYYILIAGTVDSVAQSIEAGTKIGAANIVGNLVIPRVSDQVIKAINKTEVPDEMNAVGVMEYYSCSGSIIAADAAVKAADVQLMDIRLATGIAGKSFVVLTGDTAACETAVEAGLAAAKEEALLINKVVIPRPRKEVFESLIY

SEQ ID NO: 927 - protein, 1498 aa, Listeria monocytogenes
MNREALLIVSNGQQCHKNHLSPEKVVTIGNTIEHEITYPELAESIEVKYDEGSWNAGTTALQANQAVNVENLAFYLCQDLHTQVYDVVTNISVTFGVGIENDVTLDDTKSDFILLRDAKEKLFKLQVLNGEVYHNFSLVTEDCVLEPGDQLYTDGVTITIGKEDISVLAVKNRVTSKLAPLFAADNSFGEDYPDYHRSPRIIYRAPEEKISMAKPSSKPSKPTDGLIKIILPPLIMVAITVMISIFQPRGLYIIMTIAMSAVTITMAILNYIKSRKKYKIDSKQRVESYDLYLKRKTKELHETSEKQRHALTYHYPDVTELEKMALRVDSRIYEKTMFHHDFLTFRVGRGDETSSFSVEFQQEEFSQEKDELVEEAVKIKGQYLSINEVPVATDLMHGPVGYIGPRRLVLEQLQMLVMQTSLFHSYYDLQFITIFPEEEKADWDWMRWLPHANMRDVNVRGFVYHERSRDQVLNSLYQILKERKQALTEQASKQEKLYFTPHYVVLITDEKLVLDHTVMEFFNEDPSELGVSLVFVQDVMESLPEHVKTVVDIRDAKSGNIILEQGDLVNRAFVPDHLPADFDKEVISRALAPLNHLQNLKNSIPESVTFLEMYGVERVEELNIAGRWAKNETYKSLAVPLGLRGKDDIVQLNLHEKAHGPHGLVAGTTGSGKSEIIQSYIISLGVNFHPYEVAFLLIDYKGGGMANLFKNMPHLLGTITNLDGAQSMRALASIKAELQKRQRLFGEHDVNHINQYQKLYKQGKATEPMPHLFLISDEFAELKSEQPEFMKELVSTARIGRSLGIHLILATQKPSGVVDDQIWSNSKFKLALKVQNASDSNEILKTPDAAEITLPGRSYLQVGNNEIYELFQSAWSGADYVPDKESTDYIDTTIYAINDLGQYDILTEDLSGLDKKDDLTKLPSELDAVIDHIHEYTEASGIEALPRPWLPPLEEQIFLPELHQVITDELWSGEKQPLQATIGFLDIPQMQAQEPLTIDLAKDGHLAVFSSPGYGKSTFLQTITMDLARQHNPERLHIYLLDLGTNGLLPLKKLPHVADTIMVDEEIKIGKLIRRLTLELKERKQKLSKYGVASISMYEKASKEEVPAILLVIDAFDSVGEAPYKDVFEKLIAQIAREGASVGIHLVMSAVRQNAIRVQMLASIKHQIPLFMIEPGESRSIVGKTDLTIEELPGRGLVKLEEPTVFQTALPVCADGTLEIIEKIQAESEAMSSEWNGSRPAPIPMVPEVINMLEYLENKQVQKSLSEGKTPIAVDFEDVLPVNLDVQTDGNTLVLTDNADVLERTMVSLTELIGQNMEVDIALYDNSSNRFQQYRNNVNIYAGEETAMNSTSEQIVSVLEAREDGWKEIQRASNGEITLKMYVEELRPMYVLLTDSIYAAEQMSLEARKNMVRLIENGPKLGIYFVTGSQTGILYRARDEISGELRKQKTGILLGRISDQNILSLINNIYKEALLAPYEAYYIKQGQYEKIKLIAPNQ

SEQ ID NO: 928 - protein, 398 aa, Listeria monocytogenes
MNKTIEMDGTTYDFTYEDLVWSITFPKSKTRAKELAQLELLEKPATHFTPAKISSDSDSYTISYEIAPRTYGFEQVRKMGREDKLRALRNIADLGELLNTRYTFFLHPDNLIFDINLVPSIVHRGIKNILPPYELTEETFFKQYQCFVIAMFSKKFSFENLYNGSLSGARGTQFEKSILDAKTVQDIATILEEAYMKEHAAVQKNMASVPKKKYSTFRGLAVGFIIVAILLAIPVSYFAFVKVPLQNDLLTANENFLKTDYDKVITGLENVDPEKMPQSVQYELAYSYVKGEKMSDKKKENIMNTISLKSDAKNLLYWIYNGRGEFSKSLDIAKLLDDPTLAMYSLTKQIEQVQSDTTLSGDEKVEKLKTLEESLKEYDEKVNESTTTEDETTNTEAK

SEQ ID NO: 929 - protein, 83 aa, Listeria monocytogenes
LAKNTHMNVTVDFTNWGASKYDLRIPVHQPIKALIINLAETLKIDYKDLSKCTIKTTNKAILLSDDDKLTNFQIADGDILEIL

SEQ ID NO: 930 - protein, 171 aa, Listeria monocytogenes
MKYKIVALLMLLCFAFAPGVLAADSDSYLENNGKMDIKTDRLQKTEEEKTKELEQMEETELDKNGIPLFTDEMDEKIAKEKAAEKAEYDRIKDSLFEEESTSGETVKKTKEKLFTGEYETTAVNTETPTTTETTVEDETKKTKQKTVGGAIAGTLVALAGGIYVAARNVFE

SEQ ID NO: 931 - protein, 1068 aa, Listeria monocytogenes
MKKVKWSILLFLVLAIFLSAGITYLALNQSSNKESKNNSEKTHKMTIALVNEDQGDNFQGKQVEFGNQFVKSIEKDDTHEWYVVSRGVAESGLKRDVYNMMIVIPSDFSEKAMSMTSSAPEKVTISYKVNDVGNSDLKAEAEKTAASVLEDFNSRIIDVYFASILTTLQEAQDNIGTLVKEEKKYDAIYNKDVNNPLSSYTKQFKTVQDYTGTSKESFQGFQDIMKEFEESLNLSQKENEEHMKNMDAYTKTQEENAPFGAEFTENLSKFDGTLSAEDIRMQTAALEQVNAKMTSEFQILENSNSLLSQTQALQSYIAETNARIDAVDAEIMGTLENDFRTAVYNDLLRILQENEYSDKLNEIGLKDLTGEDINAGFNKMIVKEIQSLPTYNADQLASIGLDEEMYKNVVTLSKEYYSNHRGAFSEGFSFTTDPKTLPTDTLKSDTINRLKSEGVALESSSYTVEGSDYPTEIILTLDENFTFSDVDCLVNGSSNPELVQQNAYGENGIKLSIQALGSTPAEIKITGKAKLREGVNVPLIGAVNWNATLQQYEKKEYSEMPTIPSELDPTTPDTSLIVRKEPVPIKVTAPTYLNETKSSVKAITNTVKDYYKLQALFDLYYGIDASDSGQIPDFSNYQVTLENSAKASSYYYIFNKEDVIGSFVNLTTDRFVADYTKKIKAFEKRIDDYKNTMAEANSRSEDVTNRLNETTQEAINLNTNLALTLQNLESWREESKGLIEENGVVLEKSGEEATMALQLSSEFAGLLAESESLAGTSEGNLKSAEVVYKTFDAIDKEAKNIQQSGETLVKEASTLSDDLSEKLEDDETFQKNFAKVMENSRVGDRQNENLYSFLSSPVDKMNAGTIVAGDKSMPYFMILICTILAIFTSYVISHQEKKREQLNEFEKEMSLVFKNIPITFLAICVGIIEGLIIGAISGFIFEVGEIGMFLWIGVCVLIMMTLVTAFSYLLRQFNMIGMSIILLVLSLYLFLTDAVGLNIDNESIFATFRTFSPLQYMEYLLNGILSAQKDYIIVVYSLIGATVVFTGLNLFVWHRSKEKVEEDDSDEI

SEQ ID NO: 932 - protein, 97 aa, Listeria monocytogenes
MSGQIRMSPSELRDRAKTYGQSGRDIEDILSRLSQLQEQLRSEWEGQAFMRFDDQFEQLKPKVTEFANLMDQINDQLEKTANAVEEHDQQLSQNFGF

SEQ ID NO: 933 - protein, 454 aa, Listeria monocytogenes
LSQMSILEKIKDAGVVGCGGAGFPTHAKFSGEVEYLIINAAECEPLLKTDHFVMRNHAVETIKAIEMVKSQVGAEFAVIATKRYYTEEIAALRSAITELDASVTIHEMDNVYPTGDEQVMVFEVTGRVVPPSGIPLMVGCIVSNVSTMWNVFHAIQDDAPVVRKQLTVTGAVGEPKLLDVPVGTPFEVCLAAAGGTNLDEYLFLDGGPMMGKLNDQSTIADKVVTKTTSGLIVAEDTGYLHKLHYQTVEQIFNETKSACIQCSLCSDLCPRQQLGHDIHPHKVMRHFAVAEDITDIKPDPIWEEAMICCECGICEVIACPMGLSPRQVNIHVKKELLKQGVRYQTDKKEFTPDPMREYKSIAPKNILIKMGLQQYADVHLEKMHYLEVDEVFIPTKMHIGAPSIPVVSEGDIVKKGDLIAKIPDTALGANIHASIDGQIIRITEEQVHIKKVMS

SEQ ID NO: 934 - protein, 430 aa, Listeria monocytogenes
MSSVVVVGTQWGDEGKGKITDFLSENAEAIARYQGGNNAGHTIKFDGVTYKLHLIPSGIFYKEKISVIGNGMVVDPKALVEELKYLHDKGVDTSNLRISNRAHIILPYHIRIDEADEERKGANKIGTTKKGIGPAYMDKAARVGIRIIDLLDKETFKEKLEHNLGEKNRLLERFYELEGFKLEDILDEYYEYGQQFKEYVCDTSVVLNDALDDGKRVLFEGAQGVMLDIDQGTYPFVTSSNPIAGGVTIGSGVGPSKINHVVGVAKAYTTRVGDGPFPTELFDSIGDTIREVGHEYGTTTGRPRRVGWFDSVVVRHARRVSGLTDLSLTLLDVLTGIETLKICVAYKLDGKTITEFPASLKDLARCEPVYEELPGWTEDITGVTSLDDLPVNCRHYMERIAQLTGVQVSMFSVGPDRAQTHVIKSVWRLA

SEQ ID NO: 935 - protein, 225 aa, Listeria monocytogenes
MVKVYIVEDDEVIRDTIRKHLSKWGFEIGVVEDFNNILQEFLAFEPQLVILDVNLPFFDGFYWCNQIREVSNVPIIFLSSRNSRMDQIMGMNMGADYYIEKPVDLDVLMARINALLRRTYSYADLEEANVMEHNNVFLHIDTNTLTHLEDKIELTKNEFLILYELMKQKGSIVSRDEIMRALWEDESFVDDNTLTVNVVRIRKKLAEIGLSEFIKTKKGQGYMIE

SEQ ID NO: 936 - protein, 291 aa, Listeria monocytogenes
MKILVFGGTRFFGKKLVERLVSEGHDVTIGTRGKTEDNFGDTVKRVVLNRESRDALFQLAKEDWDVIYDNICFSPKEALYAVDAFKGKVKRYIYTSSLSVYSQKGRALVEADFNPEHYEIVIGDKEDFDYGEGKRLAEAVFFQKASFPVVAVRFPIVLGLDDYTKRLHFHINHIKNHQEIGISNGQAEIGFITSDEAAHFLEWVGVESDLTGPVNATSNGTYALNGFIKMLEEKIGELALVEEVTDDVDDSPFGIEKTYYLDNAKATEAGFVFNDLKVWLPALVTDILKEN

SEQ ID NO: 937 - protein, 152 aa, Listeria monocytogenes
MLNFEEKKALIESINGFELHEISMGRINVHYPASKRDKKIIVKHLHPNGNAFVYAPFLEVEPLDKQGYVNVKDYSENEIRVLLLEAKEFMDSDEDGYKEGLTKIYQDNSGEKLSLVYENKMWVIYTGENLEAVFPTLESAEGYLLDEGFFEA

SEQ ID NO: 938 - protein, 580 aa, Listeria monocytogenes
LVENLKQLQERVAVSDGRAKADLVIKNGRIINVFSGEIMDGDIAIKNGYIAGIGSFPDAEKIIDAAGAFIAPGFIDAHVHVESAMVTPAEFARVLLPNGVTTIVTDPHEIANVAGEKGIEFMLEDAKGAPLDMFVMLPSSVPATEGEHNGETLHAEKLHPLYRHEKVIGLAEVMDFPSVAKGSDDILRKIIDAKKEGGRIDGHGAGLTSADLNNYLAVGIRTDHESTTAKEATDRLRAGMFVMLREGTVGRDLLQTIPAVSEKNSHRFCFCTDDKLINDLITEGSINYNIKLAIKNGIDPITAIQMATINAANCHNLPYLGAVAAGYQADIVFLTDIETVEISKVLKNGEVVVDNGVRNEAAFKQQAAVPFVSPPINHHVHLQDLALPLTKETCYVIGMQPNSLFTEKRIEQVTIQGGKFVPTVENDLLKMAVVERHHDTGCVGVGIVKGFGLTEGAIATTVAHDSHNIVAVGVSDEAMKAAIDHITQTGGGIAVVNGAGQVLHDLALPIAGLLSDKSYEEVENDLAGLLNAFKQISTANGFDPFLTLSFLTLPVIPELKLTDQGLFDFATFQIISNEVN

SEQ ID NO: 939 - protein, 346 aa, Listeria monocytogenes
MNWWSYLKDKRFFLLFFCSIMFFVGVLISIDPNSKLTLGNFIYLYVFVLVFLLSYLVLGYFFKYSYWREMKELVSGEIEENIIELLPKPRTREQAFFNQLMAKKHKEELRTISKLQDKQQEYHDFILYWVHEVKTPVVASKMLINNPDLNDTETIFKQIDEELTTIDKLVMQALYFSRLDTFSKDYFIQEQNLGVVVRESVKRHSKLFIGKKMKLDLQNVDMDVRTDSKWLGFILDQILSNALKYTKSGGEVKIWCDTEASGKKVLHMKDNGRGIKEEDLPRVFEQGFTGNIGRQEKKATGMGLYLAKQMAKKLGHEICIQSESGVGTEVKIYFEQKDDYLLIAKD

SEQ ID NO: 940 - protein, 213 aa, Listeria monocytogenes
MDYIMEILPALLDGAKTTLLVFAVTLVCSIPLGAVVAVGNISKIAPLKFILNIYIWIMRGTPLLLQLIFIYYGLPIIGVVFDRMDAVFIAFILNYAAYFAEIFRGGFLSIENGQYESAKVLGLTYGQTLRKIVLPQVVKRVLPAIGNEVINLVKDSSLVYILGIGDLLRAGKIAMSRDVTLIPLVLVAAIYLALTAILTVLFKQLEKRFSYYK

SEQ ID NO: 941 - protein, 215 aa, Listeria monocytogenes
MLEIKNLSKKFDQKTILDNVNITLQDGEILSIVGPSGGGKTTLLRCISGLEKMDAGEILIDGEKIDPMSRKDVENTIGVVFQEFHLFPHLSVLDNLILAPTLARKTKKADAVKEAERLLGLLDLADKANSMPYQLSGGQKQRVAIARALAMNPKVLLFDEPTSALDPDLRDHVAALILSLKKVGITQIIVTHDHTFAEKVADQMMEVEPLKKEAI

SEQ ID NO: 942 - protein, 271 aa, Listeria monocytogenes
MKKGLLITVMLMVMLALGACSSSESKEDQWSRIKKDKEVVIGLDDSFVPMGFRDKDDNLVGFDIDLAKAVFAEYGIKAKFTPIDWTMKESELKNGSIDLIWNGYTVTDARKKQVAFSQPYMKNEQVLVTLKSSNINQFSDMKNKTLGAQNGASSIDDMAKKPEVLTDIINNNEPELYDTFDTAFIDLNNKRIDGLIIDEVYARYYIDKQKNKDDYNIITGGFDATDFAVGMRKSDKELQKKINEAFEKLYKEGKMQEISKKWFGDDEIAKQ

SEQ ID NO: 943 - protein, 368 aa, Listeria monocytogenes
LLNKELIVRGAPQEYLCQVGAWDTLPTHLERRGLKNVLVVRGNASWEVAKKKFPVLSTVTSTFEVYNGGSTYEERDRLVAIMETNKMDAIIAVGGGKIADVCKAAAAVLRLPVIILPTLASTCAAYTPLSVMYDEEGAMIRYDVFASSNALLLIDPEMILDSPKELLIAGIGDTLAKWYEADVIINSLPTKSVEIEIAHFAAKMCRDNLLQYSGEALAAMDKQVLNEAFVKIIETNILVGGMVGGFGDDYGRCAGAHSIHDALTMVPETHHLLHGNKVAYGILVQLVIENRWDEIERLLPFYSELGLPMSLYDMGLATLAEETLVDVSRRATEPHETIHMMPGEMTADVVLNAMKQLEDSMAMKRVTK

SEQ ID NO: 944 - protein, 172 aa, Listeria monocytogenes
MIIRKEQPQDYEAIRRVNEEAFKGTVEADLIESIRRSDYYQPALSLVAEAEDGLIVGYIMFSEISLEAAGRSRFILALAPLAVLPAYQGTRVGSRLMEEGIRLSREKAYPAIAVLGHADYYPRFGFIPSEQFAIPAPFDVPAEYFMLLELYDGSLENLAGTIHYPAAFSENN

SEQ ID NO: 945 - protein, 295 aa, Listeria monocytogenes
MELRQLKYFMEVARVEHMTKASENLHVAQSAVSRQITKLEEELGVHLFDRVGRNMQLTSVGQDFLKQAAIALNELQKAEALVTEYTDPAKGTVRVGLPNSLSTKVLPSVISTFREKYPQITYQFMEGTNEELTEMLLSGVLDMTFLSPVPESSEQIEAIRFFDEKLKLIVPKTHPLAENFTVSLKELASEKFVLYPEDFDLYKIVTKAANKKGFEPQIAFQSRDFYTIQGLVGAGLGISILPEMILDGAIFKETKSIALRDKELRRSVGIITTKKRNLSPSENLFRSFIISFFSN

SEQ ID NO: 946 - protein, 1530 aa, Listeria monocytogenes
MKQTNLPKKHGLYNPENEQDACGIGFVANIKKISSHKIVEQGIHMLCQLKHRGGEVGGDTGDGAGILLEISDSFFRRECSKLGITLPEKYHYAVGMFNFPQNKTERECLMDETEKLIASEGQMFLGWRKLPTDVTKVGAGARKTEPAIYQLFIQKNAKLDEAGFERALYLIRKQIEKFAATSKLITETFYVPSLSTRTVIFKGMLLPEQINQYYLDLADPAYVSAFALVHSRFSTNTFPSWERAHPYRYLIHNGEINTQRGNVNWMKAREKRAESGLLGEDLAKLLPIIDESGSDSATLDNALEFLVQAGRSLPHAAMMLIPEPWDKNPHMTDPKRAFYEYHSTLMEPWDGPTSISFTNGRVIGTILDRNGLRPARYYETKDHTIIYSSETGVVPVDPSEIIRKETVGAGTMLLIDLEEGRIVADAELKEELTTEKPYRAWLEAEMTEIADLAAADLHYEAMDKSERFKKQRAFGYTQDELNKILIPMVTEKKDPMGAMGYDAPLAVLSQRPQVLFNYFKQLFAQVTNPPIDGIREETVTSAMTLLGDEGNILNPTAQNANRIRLKTPILSRKEFAALEQQTKFAQPTVTLPILFKAEERDGLEARLEALFAEADEKIAAGAELLILSDEGVNADWIGIPSLLAVSGLHHHLVKAGTRTQVSIIVKTAEARDVHQCALLIGYGADAVFPSLAIDTFDGLIKEGRIKGFTLDEAESRYIEAITDGILKIMSKMGISTVQSYRGAQIFEAIGIGDDVIRNYFPGTASQIGGIPLEVIAQEAWLRHREAYHDIGYQSFTLNTGGEYQWRSNGEYHVYNPLAIHSLQQATRENDRETYNLYSDLMQNQNNAFLRGLLTFTSDRKPIPLDEVEPAEAIFKRFKSGAMSYGSISQEAHEALAIAMNRIGGKSNSGEGGENPNRFTPDENGDWRRSAIKQIASGRFGVTSHYLVNAEELQIKMAQGAKPGEGGHLPGNKVYPWISKTRGSTTGVGLISPPPHHDIYSIEDLSQLIFDLKNANQNARINVKLVSKTGIGTIAAGVAKGNADVILVSGYEGGTGAAARTSIRHAGVPWEIGLAETHQTLLLNGLRNKVVVETDGKLMTGKDVLVAAMLGAEEFGFATAPLVTLGCVMMRVCHLDTCPVGVATQNPELRKKFSGSADYVVNFFHFIVAEMREMMAELGFRSLTEIIGHKEFLTTHEKKEAHWKAKYIDFSNMLYSDDFYKNQVQYCTKQQDHKIDQTLDMRELVPLIQPALENGEKVTGTFAVRNVDRAIGTIAGSFISKKYGAAGLPEDTISLDFVGSAGQSFGAYTPLGMTLRIHGDANDYFGKGLSGGKLIVSPDAKTPIKPHDSAIVGNVTLYGATGGFAYMHGKAGARFAVRNSGATAVVEGIGDNGCEYMTGGAVVVLGDIGENFAAGMSGGVAYIYTNNKQATTAKINHELVNSRSTFSTSELTKLKQLIEQHANLTGSDFAQDILQNWEAEKANFIFVIPNEYEMMLTRITTLEQTGKTHDEAELQAFYEHKDGKLVAGVAK

SEQ ID NO: 947 - protein, 395 aa, Listeria monocytogenes
MAKEKFDRSKPHVNIGTIGHVDHGKTTLTAAITTVLAKKGYADAQAYDQIDGAPEERERGITISTAHVEYQTDSRHYAHVDCPGHADYVKNMITGAAQMDGAILVVSAADGPMPQTREHILLSRQVGVPYIVVFMNKCDMVDDEELLELVEMEIRDLLTEYEFPGDDIPVIKGSALKALQGEADWEAKIDELMEAVDSYIPTPERDTDKPFMMPVEDVFSITGRGTVATGRVERGQVKVGDEVEVIGIEEESKKVVVTGVEMFRKLLDYAEAGDNIGALLRGVAREDIQRGQVLAKPGSITPHTNFKAETYVLTKEEGGRHTPFFNNYRPQFYFRTTDVTGIVTLPEGTEMVMPGDNIELAVELIAPIAIEDGTKFSIREGGRTVGAGVVSNISK

SEQ ID NO: 948 - protein, 159 aa, Listeria monocytogenes
MKYPIMLDITGKKVVIIGGGKVALRKITGLLDAGADILVVGLKILPEIKALDVRVVEEAYRPEHLHAAFMIFICTDNLEVNQCVLRDREAGQLVNDTTDQANSDFFNMATVTKNELMVGISTGGGNPGYAKKVKREVSQLVANLETEEIGRRNKKDKTC

SEQ ID NO: 949 - protein, 489 aa, Listeria monocytogenes
MGKATGFMEYDRIPSPGRDPKSRTRDWNEYSLPMPVADLTIQAARCMDCGVPFCSVGMEIKNGVSGCPLHNLIPEWNDAVYRGDWYEALQLLLKTNNFPEFTGRICPAPCEGGCTVAISEPAVGIKSIEKAIIDRGFEEGWIKPAPPKKRTGKRIAVIGSGPAGLACADQLNKAGHSVTVIEKSDRIGGLLMYGIPTMKLEKEQVTRRVNLMAEEGIEFVTGVAAGTDVTFAELREEYDSIVLATGAGNARDIPLAGRDAAGIHFAVPYLSQSTRDNLDNGGIQTLSAKGKNVVIIGGGDTGADCVATALRQGAKSIYQFGIQDKLPELRDGENPWPQYPRVFKMDYAHEEAEAVYGRDPREYLINTTSFEKDEAGNLIGLHTVEVEENKAERKYTPVEGSEKYFEVDMVLIAIGFAGTTEDIFTNFGVGKTDRHTIDAAKGFYRTSEEGVFACGDARHGQSLVVTAIAEGREAAREVDFYLMGETFLP

SEQ ID NO: 950 - protein, 276 aa, Listeria monocytogenes
MNQYRQKSRGAQIAVISILTVGGFFMILPFIWMVLSSLKTDAEILKIPPTIWPETFTLDNFTKLFTEMDFAIYLKNTLIIVFFSFFGLFLNAMAGYGFAKFKFKGKNKLFYLVLATMMIPGQVTMIPVYLLLNAAGLTNTMTGIVLPGLVGAFGIFLFRQFMSTISDDLLEAARLDGASEFYIFWRIVIPISRPVLAVQGILTFIAGWNSFLWPLIIANDEKFYTLSVGLQLLKGQYGSNYALQMAGATFMVIPIILIFMTFQKYILKGFNVSGMK

SEQ ID NO: 951 - protein, 297 aa, Listeria monocytogenes
MKQFLNKNTPYLFISPALFLLLLFSLLPILLAFVISFTDIDLVGLADYSKINFIGIDNYVNIMQDPVFLKSIFNTLFYVVIGVPLVIVCSLGIALMINFSQAKIFQFFRLIFYTPSITNVVAVAVVWSYLYNPRFGLLNYLLSFLDLGPVPWLQDPTIAKLSLIILAVWRAIGVNMIIFLAALQGIPREYYEAASLDGANSRQQLFKITVPMLRFAIFFVTVTTMIGWLQFFEEPFVMTEGGPLDSTNSVALFIYQNGFQLSKFGYAAAGSFILFIAIIIITIIQFRIQRKNNGGDI

SEQ ID NO: 952 - protein, 414 aa, Listeria monocytogenes
MKKKMFVVLALVLSLSLVLMACGGSKDDANSGDSKVLNVWAMGDEAKSLKELAQKFTKDTGIEVKVQVIPWANAHDKLLTAVASKSGPDVVQMGTTWMPEFVEAGALLDITKDVEKSKNMNSDLFFPGSVKTTQFDGKTYGVPWYAETRVLFYRTDLLKKVGYNEAPKTWDELSDAALKLSKRGKDMYGFAIDPNEQTTGFIFGRQNGSPLFDKDGTPVFNKKPFVDTVTYLDSFIKNGSAPDTDLGLDASQSFGGDGIVPMFMSGPWMVNTLKDTAPDIDGKWATAVLPKKENNESSLGGANLSIFKYSDKKDDALKFMDYMSQPDVQLSWLKDTNSMPARMDAWEDDMLKNDPYYKVFGEQMKTAEPMPLIPQFEEIAQLYGKSWEQIYRGGADVQTQMDTFNDQVETLLKK

SEQ ID NO: 953 - protein, 136 aa, Listeria monocytogenes
MATRSEQIFINLPVKDLQATVAFFTELGYEFNPQFTDENATQMLIGDNIFAMLLKEDFFQTFHKEGIADTTKAREVLITITQDSRQAVDKLVDRAFEIGAKQAGETQDYDFMYSRSFLDLDNHLWEIAYLDESALK

SEQ ID NO: 954 - protein, 170 aa, Listeria monocytogenes
MARPKNKVELLQQSTEKYQQLNDLINSIPKEKQQLTFPFEDRDKNIRDVVIHLHEWHKMALDWYEVGMGGKKPFMPAEGFTWKTTPELNLVIWQKYQETDLAQARELLDETHNKEMVLIAGHSEEELFTKKYYKWTNTTSLGAIFISSTSSHYDWAIKKIRKFKKAAGIK

SEQ ID NO: 955 - protein, 135 aa, Listeria monocytogenes
MFNQAKRISTFFTFNGNGEEAFNFYLDTFPDAKKVGLTYFTKPEQGGDIGKVLNATFEMKGASFMIMDMTNNASPNFSWATTTLYFADTEDEFDTLFEKLAKEGTVMMGPEAVEALRKVAWVTDKYGITWQLAFV

SEQ ID NO: 956 - protein, 113 aa, Listeria monocytogenes
MKKIVILIISLLLLVGIGFGVYYFKNANHIGADVSYIKITTDGEKGKNVSFNYSYTMPAYDEAGKETEVTFSADKNLRKGAYLKLYIKEDKGVTSYEEVPEKEVPSKAAEKLK

SEQ ID NO: 957 - protein, 127 aa, Listeria monocytogenes
MILQETKEVFGKKIRANNANFSPIAELWGEVMVDKPAGDIFAVYSNYASDYKGDYDLLVGTKDWDEEKSVLIEVGDYLVFSVDNASHKGVEETWQKIWARDSELKRAYKTDFEWYHTSGEIDIYISI

SEQ ID NO: 958 - protein, 298 aa, Listeria monocytogenes
VKLERILAILVMILERKVLASELAEKFEVSTRTIYRDMDTLLYAGFPVVALPGKNGGFTMLDTYKLATFTFSEAEKQILLEALEARSEFMLNDSQEILREKITLLQTEKPTSKHIFFDSATQHRQQIEAEVKRKIAYIQKAFTTNKQLKITYIAMSGAETTREISPQKLNLMDGSWYLEAYCHKRAAIRHFKLTRITSLKEIDKAIMEVEETEYQPAEMKRIVLEFPKNQLGKLLDYFLQEEMETGDDYVRVSFFYDLERNIIPFLLMFGSAVKILEPASLQKDYKSEVEKLYFNLNC

SEQ ID NO: 959 - protein, 189 aa, Listeria monocytogenes
MRSLRKIVIILIIIGFMYLLIVAAFMFSGSRTKPSENADTVLILGAKVKGNPAVPSLVLQERLDAAVAYLNEYPKAKVIVSGGQGADESATEASVMEEYLVNEGIARKRIETETKSKRTEENIKYSNAKFNLGKTVIVTSDYHMYRALMLAKRQGIDASGLPATSQTFAKYKGMMREVLSITYAWVFDH

SEQ ID NO: 960 - protein, 139 aa, Listeria monocytogenes
MYRLLSIAFFGIAVICLLFPWMSSGIDAATFELVYEPAYKLIWMQPIIIVGYLGFLCTIFIPKFQRGKNRIVPFIGILILVLGLLNLAVRPLFGFDSFNFSIIDAYVSELVEPAFLIAVSASILSLIMYAIYLKKSENL

SEQ ID NO: 961 - protein, 1310 aa, Listeria monocytogenes
MKKGMKQVCVSLAVVPLVWLNLGITQPLQVEVKAEETKKKETQKKANTETAKQLSKEEYAKLSAEEGLGNVLEATVTDNVITLKIDNGDEAEDDYLEISPLANNLLKVNLRPRNIENSPSTPMIDPNATFTAIGATIDLESDPMIISTDECTLEIDKEPARMTFKDKNGKTLLSESADGGIFDGGVRFKRGASDHVYGAYGISFSDGDLGMERDDTAADSNKTAQAGQQGNAGGPFMWSTAGYGLLVDSDGGYPYSVSDEEKLEFYYGDTIVEGRRYVKENVEMYLMSGEPEEIMSSYADVTGHTPMMPKWSLGFSNFEWGTNEAEFRENINTYRAKGIPIDSFAFDYDWKFYGDPTYGGDYGEFAWNTENFPSAKDTTLKSDMDALGVKMIGITKPRVVTNLEDGTATQQGKDADANGYWYPGQSAYEDYAFPVTVRSIDPYNADERNWWWSHSEDALDKGIVGWWNDETDKVSSNGADYWFGNFTTGFTSEAMYEGQRDYTNERVWQTGRTFYPGAQRYSTSTWSGDIGVQWKKGEVIDWANGMQEQPSTMLSTINLGQTKWGMDTGGFNANSGQVLNPDPELYSRWMEFSSLVPVFRTHGNQNQQRQPWFYGGTAEEVAKSSMTWRYSMIPYMYAYERQAYDSGVGLVQPLTFDNPTDENVVNLTDEWMFGDGLLAAPVLEEGAGSRDIYLPAGTWIDYNRGDVYEGNQTINYEVNDDDWTDVPMFVKQGAIMPMQQPQNYVGESAVKTIYLDTFASDKETSFTHYDDDGKSFDYEKDTYLKQKMTTSKTADTSTFTIGAKEGSYKADTENYIVKLHGNAAESVQVNGADSKVYDDLSALENADGSGYAVGSDVYGAVTYVKVPAQADADTVITTSGSASIVQTGTYEMETGSNFADTVADKPVAEKTYVDGYDKDGAGTTIYANVKDSGDYNVDLTYKNASSDNQALSIFVNGEYVKQTTLKPNTDWSVQSETLPLSAGKNSISYKVVTDTGDKADQVSLDKVNIGFTPTVAKVEAEEADLAGTLKVANDHWFYSGEGFVGGFGTAGDEIKFEVDVPADGEYVLNTRTANGTGMPQTLDLYTNGDYNSRVTFPSKGENWNIWSDTEKAVNLKAGTNKITFLRDGETTGNVNIDRILVSAEPINSPVQSEVNLLDNGGFERDAAATTNWVESHPDGQDKAYGVDSGSGVNPPESPAFGKQSAYFYLPGAYKQTLAQQIAVPVNNANYDVEAWVKVSKDDAAKAQMTVNNYDSSGGKTIDLVADDVWHYVTIKDVKVTTGNINTSFQMDSPGGTSIHIDNVRVMPSAE

SEQ ID NO: 962 - protein, 300 aa, Listeria monocytogenes
ILFAPTIKAQADTVPLPAPIIEAFPVEAIAEAIAGELDKDSVNDTITQADLDTMTAIPLPSLGLTGEDLSVLNNEVFTNAIELAIWSNNIGELPDLSEALPALENIEANGANITVFPDANYPNLTNVDLSQNNFGFNIPKFVGMEGLVSINMENAGLSGYIAEDIWMNMPNLDSLILNENHLISIPEDIFLSQQLGTHSFANQTATYPPTTIKQGENLKVFVPFIYQALDFIAPSNHDLIIIKDNGRTLYEPPYPTYDGSYMYTIETAGLQPGEHLLEISLGYNSGEYTGWYDFPVTITE

SEQ ID NO: 963 - protein, 1091 aa, Listeria monocytogenes
MKRRTRKCSLVFILGILIFSCLSGFGTNVFAMDGEYHSPYGDDDLYTVQPTERSPRDPKAGEDVILNITTWPIENGQDVWVEWTKNGVAQENVTAAYDYNSGNNTYWKADLGKFEKGDEITYTTKGSTNGGTAYESGPFTFYVTDWEYVQDVTSVVDNGDSITLNMTATAGDFSPKLYLSFEDLDTLRMELSPTGKETGHAGKSGYTVEDTAEKVTVTTEDLSIEIQKSPYRMEVHQADGTLLTSEYTTANSLGWLTDGKNVINQYQNNFMTPSDEAFYGFGERYDTINQRGKDVETYVYNEYQDQAQTERTYLAVPFFVSANKYGMYVNSDFHSQFQMASKVEDKYSFVLDNDGDMTNMLDYYVISGKDQNDIVNNYTDITGKTTLLPKWAFGLWMSANEWDRESDVSSALSNAKANDIPATGFVLEQWSDEETYYIWNNATYTAKKNGEAFSYDDFTFNGKWTDPKGMVDSVHDAGMNIVLWQVPVLKDDGTVYEQRDNDEEYMISQGYSADDGTGAPYRVPASQWFGNGILLDFTNKDAVDWWTSQREYLLTEVGIDGFKTDGGEMVWGRDTTFSNGEKGQEMRNRYPTDYVSSYFDFAKSINPEAVSFSRSGTSGAQKSGIYWSGDQTSTFDSFQASLKAGLSASTSGVSYWAWDMAGFTGDYPTAELYKRATAMAAFAPIMQFHSEKSDPSPSEERSPWNAVARTGDETILPTFQKYLYTRMNLLPYIYTAAKDTADNGKSMMRQMAMDYPEDVNARDLDEQYMFGDDLLVAPIVQEGQTEKEVYLPEGEWVDIWNGGVHPGGETISYYADVDTLPVFAKAGAIIPMNMTDGYQLGQNVGNDLKSYDNLTFRVYPSGDSEYSFYDDVNGGEMRDISVSEDFANEKVSVDLPAMADETTMQVFSTEPTSVTIDGADVAKADTLDAFNEATTGYYYDTVQNLTYVKAAAKDAKQAIVLNGVNHAPYEAEFGHLTNVTTASDHAGYTGTGFVAGFDAEKEAVEFDIDAVDGASDYTMEVRYSAGVEDATRTVYINGKKQQITLPKTANWDTWNTVEVPVTLQAGNNQVVFDFEADDTAGINFDHVVIKK

SEQ ID NO: 964 - protein, 302 aa, Listeria monocytogenes
MQNIGDTLKFIRKSKNLTQQETCTNALSRSNYQKIENNKIMPSMDRFIQILLNFNMTLEEFEFVKRDFTPSPKENILYLYSKIITSSETDILLDVISKCDDYLANQNDIFISDIKASLEGILLAEKEHNFELAREKVAYIWDRLSEADELFWNDILILRNIFFIFENETAQHIVNRLISQLKKYRYLYPTLSIEISLHVNRATYLILDEEYELALHYIELSIKIAKHNHYYLQFCMAVAKKGIVLYKLDQKQQGKHFMQRALRVAKVLEEERILNGIKNEIDYFLHDELQDLSLNEFTKIDI

SEQ ID NO: 965 - protein, 154 aa, Listeria monocytogenes
MPKGDGKLVAQNKKARHDYAIEETFEAGIVLQGTEIKSVRNARVNLKDSYARIDKGEIFLHNMHISPYEQGNRYNHDPLRTRKLLLHKKQISRLIGETKESGYSIVPLKMYIKDGYAKVLIGVARGKKKYDKRQDLKQKEAKRDIERAFKERQQ

SEQ ID NO: 966 - protein, 793 aa, Listeria monocytogenes
VEQKQMEEKIMNLLTSAPDKTFALEDLEIEIALNNADNFKLMVKALVKLEDSGTIVRSRKNRYALPEKMDLVKGTFRAHERGFGFVLPEEKEMDDIFIPPNEVKDAMNGDLVFATITKRKGDNLAEGTIKKIVERKTTQIVGTYMEDLAGTPIVMPDDKRLFGEVEIDLEDGLKPVDGHKVIVELTEYATGHARARGVVKSIIGHRNDPGVDILSIIHKHGISIGFPEEVMEQVSKAPDLVDDSDIGNRRDLRDQMIITIDGADAKDLDDAVTVKQLPNGNWKLGVHIADVTHYVTEGSPLDIEAQERGTSVYLVDRVIPMLPHKLSNGICSLNPQVDRFTMSCEMEIDQEGHVVNHEIFESIIKTTERMTYTDVNDILVEKDEALREKYAPIVPMLEAMQNLAEILRRKREKRGAIDFDFKEARVVVDEDGHPEAVVMRERSAGEHLIEEFMLAANETVAEHFHWMDVPFIYRIHEDPKEDKLARFFEFITNFGLIVKGTANDIHPAALQQVLEEVKGKPEEMVVSTVMLRSMQQAKYDTVSAGHFGLSTDFYTHFTSPIRRYPDLIVHRLIREYLINGDVRPETLEKRAEELPEIAEHSSKMERRAVEAERETDELKKTEFMVDKVGERFIGIISSVTNFGLFIELPTTIEGLVHVSAMKGDYFKFHQNQLAMIGERTGQIYRIGDEVEVEVTKVDVDAREIDFALRSEGKPGPVSDKQKRQREKPIDKTRNFKSSSKNNRNKRRTGKSEDVKPKTERKDDEWYTKPKKKKKKKPFYQGVAKESPKKKKRR

SEQ ID NO: 967 - protein, 248 aa, Listeria monocytogenes
MKITPPQPFLFEKGKRAVLLLHGFTGSSADVRILGRFLQENNYTCYAPQYRGHGVSPDLLLKTGPNDWWEDVLEAYDHLKSLGYTEIAVAGLSLGGLFSLKLGFSRPLKGIIAMSTPTRMDSSSPIIQGFLDYVRNYKKLEGKTTEQIDAEMVAYKDAPMNTIAKLKDEISGVVAEIDMIYAPIMVVQGEKDDMVDVSGAQLIYDTVESTKKELHWFKESGHVITLDKERKEVNQAILTFLDSLDWQE

SEQ ID NO: 968 - protein, 209 aa, Listeria monocytogenes
VKAVVFDFDGTMLDTENLWYTETMNYLKETYGIDLPDEVYQQIIGTSEEPIIRYMMEATNGAFDKEAFLTTVAEACHLGQQSLGFRDGFKEFFEQVKANDYKIGLATSSGFDWIEPTLNRLGILADFETIQTADHVDEIKPHPALYLQAVEALGVKPEEAVAIEDSKNGALSAMQAGLKVYIVPNEATKNITFPKEATVVSSFAEINLK

SEQ ID NO: 969 - protein, 382 aa, Listeria monocytogenes
MNHSKIAKKHQQMPVNILADIGTLAKTMPDILDLSIGDPDLITDESIINAAFEDVRAGHTKYTESGGDVELIDAIRGYFSRNYDLSFERSQIRATVGALHGMYLTLQTILDDGDEVIIHEPYFSPYKDQVLNSGGTPIIIPTYEKDDFAINVDILEAAITDKTKALILNSPNNPTGAVFSPETFEKIANLAKKYDFFILSDEVYDGFSFYEDFVPMAKFAPDHTITFGSMSKNFAMTGWRLGYMIAPTYLNEAAKIINEGITYSAPTPSQRAAIYALNHSETLIPLVAETFQKRLEYIAKRVEKIPYLSLHPLKGSIYAFINISKTNMDSVSFTEYVLKETQVLVIPGLAFGESGDNYVRLAATQDISVLEEAFNRLAKLTF

SEQ ID NO: 970 - protein, 241 aa, Listeria monocytogenes
VINIKNLHKHFGKLEVLKGIDLEIASGEVVVVIGPSGSGKSTFLRCLNLLEQPTTGTILFENKDLMAKQTNVNELRQKMGMVFQNFNLFPHKNVLENLMLAPMKVKNEDSAAAKKHALSLLEKVGLADKATSYPSQLSGGQQQRVAIARALAMNPDVMLFDEPTSALDPEMVGEVLSVMKSLAKEGMTMVVVTHEMGFAREVADRVVFMDAGVIQEQGTPEEVFGNPQNDRTKDFLGKVLA

SEQ ID NO: 971 - protein, 486 aa, Listeria monocytogenes
MQKHLLQKFAAILLVFIVVFSGFTSVFAADTEDQTLAKIQEKGVLTVGLSADYPPYEFHQTIDGKDKVVGFDVSIAEKIAKDLDVKLDIKEMNFDSLLGSLKTGKIDMIISGMSPTPERQKEVDFSDPYMFVQQRVVIRKTDKDKFTSVNDFSGVKVGAQKQTTQEELAQNELVGSEVVSLQKVPDLILNLKSNKVDAVVLEGPVAEAYISQDKTLAMADIKFSNGSKETAIAMPKGSTALQEKVNASIKDIQDTGLLKEYQKEANKLMFQDGSFYEKYGNYFVTGTLITIALAAIGVLCGAILGSLLALMKLAKTRWLRWPAACYIEFVRGTPLLIQIFIVFFGTQIIGMDVSAFVSGCIALSLNSAAYVAEIIRAGISAVNKGQMEAARSLGMTQGASMRYIILPQAVKNILPALGNEFVTVIKESSIVSVIGVTELMFMTGVVQGASFKPFIPLIITSLIYFVLTFSLSRLLGVAERRMRTSD

SEQ ID NO: 972 - protein, 332 aa, Listeria monocytogenes
MEGMFLITLVIVLAALAFDLINGFHDTANAIATSVSTKALKPRHAIILAAVMNFVGAISFTGVAKTITKDIVNPFDLDHGELVILAALLSAIAWNLITWYFGIPSSSSHALIGSIAGAAIASAGFAAIEYSGFTKIIIGLLVSPVLAFVVGYTIYSLFKVFLKNLNLATTNRRFRMIQVGTAALQSYTHGTNDAQKSMGIITMALIASGFQTTDDVQLWVQVSCAIAMAIGTSIGGWKIIKTVGGKIMKIKPVNGVAADLSSVIIIFGATFIHLPVSTTHVISSSILGVGTAHRVKGVKWDTAQRMIITWVITLPISATIAALIFYVLRFIL

SEQ ID NO: 973 - protein, 79 aa, Listeria monocytogenes
MQEVTIKLNEELKTINVSLVFASKNPQTNQTNVNLSYSEKDEQKWLQLFYVEEEIETLIPGIREGKITDLSQYVIQEID

SEQ ID NO: 974 - protein, 206 aa, Listeria monocytogenes
MAFKNKKDRFASLLHDIAVNLHEGANFFATYNINSVEDLHTFSNKIKEYETAGDSMVHKMIMELNDAFITPIEREDMLELTNRLDDVMDALDETAFSLEICQITHYDEYMTKFIQAIQASTVEIEKAVDLVFDKKLKDVRKLAIQIKDYESQCDDVYRESLIQLFQNEKDPIKLIRLREVYEKLEDIADSCQSVANTLESIVMKNA

SEQ ID NO: 975 - protein, 294 aa, Listeria monocytogenes
LTKTLQDRMILPGNGTIPYIGLGVFQVTEQEFIAGAVEKAIEVGYRLFDTAAVYNNEAIVGQAIASSAVSREELFISSKVWNGDLGYDETLFAFERTLRNLKLDYLDLYLIHWPVAGKYRDSWRAMERLHDEKLIKSIGVANFKQHHLSDLLVAANEKPVLNQVETHPLLPQNDLRKYLVEQNIAHAAWSPLAKGILMQNPVITEIAKKHQASVDQVILQWHLNRNTIIFPKSITSSRIEENSRLSYFQLDASDMEKIDRLETGKRVGPDPDDLEYFLSSIERERAYLASENEE

SEQ ID NO: 976 - protein, 218 aa, Listeria monocytogenes
MTDIQTLFRTNRSLTDAPPMEAYMKNQFTFLGIRAGERKKLVAAYLKENGAPQDLLEFTIALFAEEEREFQYVAIDLLSRYGKKQPSEAIKVYEQLIVTKSWWDTVDGLAGTVVSNHFKLYPELIPTYNEAWINGDNIWLARTAILFQLKYKEKTDVDLLFFNCEKWLASKEFFIQKAIGWALRQYAKVDSGAVRQFVNSHSLAPLSRREALKHIGEA

SEQ ID NO: 977 - protein, 130 aa, Listeria monocytogenes
MLHHVEIYVADLEESRLFWSWLLEELSYEFYQSWNEGFSYKYADTYLVFVQTEEPFISEGYHRKRVGLNHLAFHGGTKERVDDFRVKLKAKGIKLLYEERYPFAGGKNHYAVFFEDPNGIKVEICTEVTT

SEQ ID NO: 978 - protein, 289 aa, Listeria monocytogenes
MTHVTLPILEDWEGLSLTTILQEKFHLGKKARHEIRMSQNVLLNNKPLDDWNTPLFVGASLSLPIFLHDKIPVYEYDLEIIYEDDFLLVVNKPVDMKTHPNDSYETDTCANAVQYYLEKTGQDANALAVHRLDQTTSGLVLFAKNKLAIAGLSWQMENRAIHRTYLAAVDGTWGLVMQTINKPIGEDRHHGSRRQISPYGQPAVTHVKVLENDNEKNTSLVECQIETGRTHQIRVHLSGIGHPIIGDTLYGGSPRANRIMLHAEKLHLNHPFKGKEMNFSAPAGDDWVF

SEQ ID NO: 979 - protein, 188 aa, Listeria monocytogenes
LSDYYLTKKRWQAISTNDKTADGAFFYGVTSTKIFCYPSCKSRLPKKENIVIFHSAEEAFSHGYRACKRCKSGGSALPDTEWVNNIEMYIKENFAKALTLKIIADDCHGSPYHLHRTFKRITMITPITYLENVRINYAKMQLTTTNQSIETIGKMAGFPNPSHFSTTFKRHTGLSPNQFRKTIIKKLN

SEQ ID NO: 980 - protein, 160 aa, Listeria monocytogenes
MTDLYYDTLHFSDTELYFAATKMGLVYVGTKAEKLQSAKRSPEKMNIYKEELAAYLHGELTNFTVPIDLSATPLQIEVFHALKTIPYGETRTYTEIAELINRPKAVRAVGTTIGRNPLLFIIPCHRVIGKNGNLTGYSGGIGMKESLLKLEKANLNQFSF

SEQ ID NO: 981 - protein, 131 aa, Listeria monocytogenes
MFTINTKSQLPIYEQIVQKIKEQVVKGVLQEGEKILSIREFASRIGVNPNTVSKAYQELERQEVIITVKGKGTFIANQTDKLSSPKKLAETRTKLKETILDLVYLGVNIEEIHKLADEYSQDIIGGDVVEG

SEQ ID NO: 982 - protein, 292 aa, Listeria monocytogenes
LKVDSLSKKIDGKLLLDKITFEVKPGEIIGIVGRNGVGKTTLFRTIMGFYIPDAGDVYLDEPLSKNHQLKQKLFMLQDNLNCWDGYKIPTIKKFYQKTYPLFDGDKFDNLMKQVNLAKDVKFQNYSKGMKGLFGLVLALSIGAEFILLDEPMEGLDIIAQKKIMGILLEEVEKRKLGIIISSHRLADLDPIADYIHILQDNHIEESYHLESLREQAVKIQIAFENKKIPHFLLENGKVINKYGRVYTILFRDMNTELYAAIKKEKPIFMDELAVTLEDLFIYHLEEQGGEKL

SEQ ID NO: 983 - protein, 190 aa, Listeria monocytogenes
MAENTKNENITNILTQKLIDTRTVLIYGEINQELAEDVSKQLLLLESISNDPITIFINSQGGHVEAGDTIHDMIKFIKPTVKVVGTGWVASAGITIYLAAEKENRFSLPNTRYMIHQPAGGVQGQSTEIEIEAKEIIRMRERINRLIAEATGQSYEQISKDTDRNFWLSVNEAKDYGIVNEIIENRDGLK

SEQ ID NO: 984 - protein, 354 aa, Listeria monocytogenes
MSTGLLWKEWRQNAWVFIFIVIAFIGSEATTATNTVSMFNDNYKYYQSEEFQKNNTADQQMTGNEIKNDLSLTPYDFEGNLGLFFYVFLFLGLKLTVFEKNKQMDYFTFGLPYSKKQIFWHKMLIPLLLIFVLVPIIIFCRFWYIYQQIPGLYLPSVSDSFMYISSFLLLYLFSYTLAMAVGNLVGEIITAGIIAIGSIVSFLYMFPGALTNLIIGFKAFFTGKTIVDIDGGAVMLYNAIPTPILQGTTALSEFGVLIILSIGMLTISWYAMKTASLENNGRFLMNNKFRLPILIIGSLYVTICLSGHYASFNYDQLIPTGQVISLIIKIILILVASVIAFWMLMYKWKTLRKH

SEQ ID NO: 985 - protein, 396 aa, Listeria monocytogenes
MKNKYLSTSLGLYMNYFVHGMALIIIAQNIDFLSQKWHTDLAGAAGVVSSFGIGKLLAVFISGRLSDKFGRKLSVILGVFFYIVFLGGILLSPNTIIAYMFGISAGIANSFLDTGTYPALMEAYPKKAASANIIVKAFVQSGQFLLPFMIAFILANNLWYGWSFIVLIVILLINLLYTLTRTFPPMTVGKPLDVAELAEEKKQKFHFSIDEICLILFGFVAQTLLYIMSQWIAKYGSEVIHMTDDASRLLVSYASVGAIICVCVTFVLGNRGVRTLHILITYVTMTMLISFTLFAFPSEIVCIVGAFLLGYFSAGGIIQLGLTLLAEVSARGKGFVTSLYTIAEGIAVFIIPLIAAAISRIDIAAIFLLNAGIALFGLALLMIVFTRKKKFARDHI

SEQ ID NO: 986 - protein, 402 aa, Listeria monocytogenes
MNAKRFYPTAIALYFTYFIHGIGVSILGQYKQDFAGVWGADKLSDGTFDVSMVIAVIAALGLGRLLTLPISGPFSDKFGRKPSALIGVGLYAVYFIGLAFAPNMYIAYAFAFVGGAANSFLDTAVTPSVLEIFTKNGAIANMFTKFSISIGQFVLPFAIGMVAAANMSFRTLFVITMALIVIDGLIIAFMPFPPMNNNVGGEKAKPEKMKFNATSWAIIGIGFTCTSTFQLWLNCNQELGKLYGMADPSKIQSFYSLGTMCAILITAVLVKKFILPVRILILYPAIATLMLLIIYIVQTPTICLIGGFVIGYAAAGGVLQLAVSTANEFFPTNKGKITSIVMISSSLANYIVLNVASYITKAGGIEGPKYVLLFNVAITVIGILLAIFVNMRYKNESKIATK

SEQ ID NO: 987 - protein, 289 aa, Listeria monocytogenes
MENRISGTTRLLGLIGTPIDHSKSPIMYNYSFQKAGLDYAYLAFDTPIQKVADTIKAIKTFNLRGANVTMPCKSEVLKHMDDLSPAARMIGAVNTIVNEDGKLTGHITDGLGFIANLRDASVDVAGKKMTIIGAGGAATAIQVQCALDGAKEITIFNIKDAFYDKAKQTVASIKQEVPNCIVHIYDLNDTEKLNAEITTSDILVNATLVGMHPNEHETPISDTSVFRKELIVADIIYNPKKTQLLLDAEAAGCKTVGGLGMLLWQGAEAYKLFTGKDMPVSEVKDLYFN

SEQ ID NO: 988 - protein, 641 aa, Listeria monocytogenes
LKFNSMFSPIDIGPMKVPNRFVVSPMCNNYANTDGTLSDTSLAYYKERALGGFGLITFEATVVDVRAKGGANKACLYSDHQIASFKRVIDVCHDAGAKISVQLQHAGPEGNSKVSGYPLRAASAIASAAGRNTPEAISREELYELIELYGEAALRAKKAGADAVEVHCAHGYLVSSFLSARTNKRVDEFGGCFENRMRLPRLIIESIRKRVGHSIAILCRINSTDGVDGGLSVQDSATVAAYLEDCGLDGLHVSRSVHIRDEYMWAPTVLHAGFSSDLVTQIKRAVSIPVITVGRFTEPHYAELMVREGRADLVAFGRQSLADPETPNKAAAGKLDELLPCIACLQGCVANMYAGKPITCLVNPLLGRESEAYLPKTPSKKVVVVGGGVGGLYAGWMAGSRGHDVTVYEASDMIGGQMRLAAYPPGKGDLTNMVRSYIKKCEQFDVEIKTNTPVTLELIQEVAPDAVIIATGATPLVLPIPGIEDAGLIHAVDLLDGKEKCGQKVLVVGGGMVGSETAAFLGEAGHDVTVVELRDEVGADVISEHRKFLMHDFDEYKIKSVTNAKVTSFFEDGVTYSLADNKEQRIDGFDSVVLAMGSRAYNPLEEAIKAIVPETYVIGDAVRARRALDATKEALDAVLQL

SEQ ID NO: 989 - protein, 115 aa, Listeria monocytogenes
MELTKENFQKLDLIHLSLENRHSMSEIIDILSESYIEITQSGVVKDYAYYKSLTTLGDSNLAIMEYDVKILDETKVLSYYKLKNLSENNYTMRSNIWIFENGSWKLTFHQGTRII

SEQ ID NO: 990 - protein, 284 aa, Listeria monocytogenes
MTNANGNLKKCPITISSYTLGTEVSFPKRVKVAAENGFDGIGLRAENYVDALAAGLTDEDMLRILDEHNMKVTEVEYITQWGTAEDRTAEQQKKEQTTFHMARLFGVKHINCGLLEKIPEEQIIVALGELCDRAEELIIGLEFMPYSGVADLQAAWRVAEACGRDNAQLICDTWHWARANQTAESIKNVPADRIVSIQLCDVHETPYKELREESLHDRLAPGEGYGDTVGFAKILKEHGVNPRVMGVEVISDSMVATGLEYAALKVYNATKKVLDEAWPEISPR

SEQ ID NO: 991 - protein, 292 aa, Listeria monocytogenes
MNLHHLRYFVTLAHMEHYTKAAEKLLITQPSLSHAISSLEQELGIPLFEKEGRNIGLSKAGKVFLDYVEESLDMIDAGVATTKKAANGEGQIDLAFLQTLGTSLIPKLVQEFLQTEPEKQIDFIFHTGVSIDIIQGLKEKKFDIGICSKLENERNIHFTPIAKQELVLIVPKSHPLAEKDWIDLIETVDYPHIAFSKKSGLRPIIDELFRKIGADYQIAYEIEVDQVIAGMVAQNFGIAVVPNMPILNYVDVKVLPIRSPNWERFFYLAVAKNQTLTPAAEKFKQFMLAHRI

SEQ ID NO: 992 - protein, 434 aa, Listeria monocytogenes
LILTIKFLIIALLIAISAFFVATEFAIVKMRPSRLDQLIAEKDKRAVLARHIYNHLNAYLSACQLGITISSLGLGWLGESTVEAALHPLFSLMELPQSAITILSFTIAFLFITFLHVVVGELVPKTLAIDKTETVALAVARPLHIFYKVMFPFIWILNGSAVFIARLFGLEPASEHEIAHTEDELKIIVGESYKSGEINQSEFRYVNKIFDFDERMAKEVMIPRTEIVTVDTGSTIGELSDIMQNERYTRYPVIDGDKDHVIGVLNLKEILSAYVEHGSSPSFSIDPYVKPIIRVIETIPIKELLFRMQRERSHIAILLDEYGGTSGLVTVEDIVEEIVGDIRDEFDADEIPEIRKIKDGHYIVDAKLLIDEVNNILGTEIEEEEVDTIGGWFLTQNYEVEVGDEIDYDGFIFRVKQGEPHHIEYIEIIKKTND

SEQ ID NO: 993 - protein, 289 aa, Listeria monocytogenes
MDGYNDLKKAEKAAFLSIFAYLFLAVLKIVAGQLGNSDALLADGLNNTTDIVASVALLIGLRISRIPPDADHSYGHRRTETISSLIASIIMFLVGVQVIWSSIVHIIEKEFATPSMLTAVVALFSGVFMYAIYLYNHQLAKKLDSQAVRAAAYDNRSDAFVSFGAFIGIIGAVLGVPWLDSVTAFLVGILIVYTAIKIFYDAAHTLTDGFDVSKLETIHDLIASVPDVKKVIDIKARMNGNRIWIDATIAVDPELNVVKSHEITEIVEQKIRNEYEGAFTLVHIEPFFE

SEQ ID NO: 994 - protein, 141 aa, Listeria monocytogenes
MTQKLIYFLSQTHIRSAIAEAWAKRLSLSNVKFISGSWHKSKSTPFIAEALNEFAIEPPESLSYSPSSELLADADLIVTIYDSAHETAPKFPANIQEKIIYWDIDDPEQEIALPQKWASYQEVCDNIALSVKNLEHVLIEA

SEQ ID NO: 995 - protein, 93 aa, Listeria monocytogenes
MISILQILLEPEFISLTVTFLLMLTIFSYWSAITLLKPKMVLPADAICIKPVKISLRAHFYRTSPNFVINWLAITRKCSAITDDEDSFSFSNV

SEQ ID NO: 996 - protein, 275 aa, Listeria monocytogenes
LKKKNIILISVLLGALLLLTGCSMDPSQNTDGFFSTYLIQPFTSFIMFVAKFVGGNYGIAIIITTLLIRALIMPLNLRTAKAQMGMQSKMAVAKPEIDEIQARLKRATSKEEQATIQKEMMAVYSKYNINPMQMGCLPLLIQMPILMAFYYAIRGSSEIASHTFLWFNLGSPDMVLAIIAGLVYLAQYFVSMIGYSPEQKKQMKIIGLMSPIMILFVSFTAPSALALYWAVGGLFLAGQTLLTKKLYMNKHPEIKVMEQEEKEFEQIVEEQKKEK

SEQ ID NO: 997 - protein, 483 aa, Listeria monocytogenes
MTTSPFSLKSRSLKFKWTFGASAAIFLTFFLFSYAIYQGIGQMLLNEEEPEVKELLLATTSTLTNQDLTDNEEIKYLFNNDKTVNRKLQDQVINLYDKDGHFINKYYFSRSQDITSIDFSQYFVSGTDKFIMNKPTIDGQKMMTAQMPIVADDNTTVIGYAQVVNPLTSYNRMMDRLLVTMILLGAVALFISGMLGYLLAQNFLNPLTRLARTMNDIRKNGFQKRIETKTNSRDEIGELTVVFNDMMTRIETSFEQQKQFVEDASHELRTPVQIMEGHLKLLTRWGKDDPAVLDESLNASLTELERMKKLVQEMLDLSRAEQISQTKELQITDVNATVEQVRRNFEVMYENFTFTLKEDDTDLRALIQHNHLEQILIIIMDNAVKYSGDGTEVDMHVYKEQKQIHIDVRDYGEGISQEEIDKIFNRFYRVDKARSREKGGNGLGLAIAKQLVEGYLGTINAVSEPDKGTTIKITLPYIEPKSK

SEQ ID NO: 998 - protein, 226 aa, Listeria monocytogenes
MNRILIVEDEKNLARFIELELQHENYETAVANDGRAGLELALNEEWDAILLDLMLPHLNGVEVCRRVRQVKQTPIIMITARDSVIDRVSGLDHGADDYIVKPFAIEELLARLRSLLRRVENAEQSAKQTTLQYRNLIVEKENRIVKRDEEIIDLTKREYELLLTLMENVNIVLTREVLLNKVWGYETEVETNVVDVYVRYLRNKIDHPDEESYIQTVRGTGYVMRT

SEQ ID NO: 999 - protein, 472 aa, Listeria monocytogenes
MAKQEIGVIGMGVMGRNLALNIESRGHTVSIFNRSTEKTKAVMEENADKKLVPTYSLEEFVESLEVPRRILIMVKAGDATDMMIEAVKPFLNEGDILIDGGNAFFKDTIRRNKELSEEGFNFIGTGVSGGEEGALKGPSIMPGGQRKAYDLVAPILREIAAVADGEPCVTYIGPDGAGHYVKMVHNGIEYGDMQLIAEAYTILKEIGGLSHDELADVFEEWNNGELDSYLIEITKNILKVKDEETGKPIVDVILDKAGQKGTGKWTSQSALDLGVPLSLITESVFARYISALKEERVYASTVLTGPSNYRFEGDKKAFVESVRRALYFSKIASYAQGFAQMRAASEEYNWDLQYGEIAKIFRAGCIIRARFLQKITDAYNQDKNLKNLLLDPYFKDIAHNYQGDLRTVVAEAVKAGIPVPTFTAAISYYDSYRSEVLSANLIQAQRDYFGAHTYERVDKPGVFHTEWPQVED

SEQ ID NO: 1000 - protein, 365 aa, Listeria monocytogenes
MMLSNVKKYFTELIQTPSVSGKETAILTYIKKHLAKLNIEYSLDEDYGLIARIPATKEKFPTIFFCSHVDTHPNAATPVFQMEQDVFTAEKGTSLGADDKAAVAAMLAAIDYFCAERTAHGEIEFIFTTKEELGMIGMRLFPEEKITAAYGYCLDAPGEVGNYQLQANTLVALEFTIASSEAAQMSPISIARMALHATRPGRIDRENKWEIQSFSGGINDENQQDAQLEVLFTSAASFRKALLHIQSIRERFAQTCEKYGAILTHDTKLIYEGYQIRSKHPLMNIFQKAAKKQSLETKEIFLEGGTDANVLNEKGIPTMLLSAGYENAHTEEETVSIEQLEKLTQLIIDLAESAKNEKILLRKLN

SEQ ID NO: 1001 - protein, 416 aa, Listeria monocytogenes
VAVEKITMPKLGESVTEGTISSWLVKPGDTVEKYDAIAEVLTDKVTAEIPSSFSGTIKEILAEEDETLEVGEVICTIETEEASSSEPVVEAEQTEPKTPEKQETKQVKLAEAPASGRFSPAVLRIAGENNIDLSTVEGTGKGGRITRKDLLQVIENGPVAPKREEVKSAPQEKEATPNPVRSAAGDREIPINGVRKAIAKHMSVSKQEIPHAWMMVEVDATGLVRYRNTVKDSFKKEEGYSLTYFAFFIKAVAQALKEFPQLNSTWAGDKIIEHANINISIAIAAGDLLYVPVIKNADEKSIKGIAREISELAGKARNGKLSQADMEGGTFTVNSTGSFGSVQSMGIINHPQAAILQVESIVKRPVIIDDMIAVRDMVNLCLSIDHRILDGLLAGKFLQAIKAKVEKISKENTALY

SEQ ID NO: 1002 - protein, 327 aa, Listeria monocytogenes
MPVISYIDAITMALKEEMERDDKVFILGEDVGKKGGVFKATAGLYDEFGEDRVLDTPLAESALAGVGIGAAMYGYRPVAEMQFADFIMPAVNQIISEAARIRYRSNNDWSCPMVIRAPFGGGVHGALYHSQSVEKVFFGQPGLKIVVPSSPYDAKGLLKAAIRDNDPVLFFEHKRAYRLLKGEVPETDYIVPIGEANVVREGDDITVITYGLAVQFAQQAAERLAAEGVEAHILDLRTIYPLDQEAIIEATKKTGKVLLVTEDNKQGSIISEVAAIISEHCLFDLDAPIARLAGPDTPAMPFAPTMEKHFMINPDKVADAMKELAEF

SEQ ID NO: 1003 - protein, 331 aa, Listeria monocytogenes
MTLKEAGLTEDKLIKMYETMLMARRLDERMWLLNRSGKIPFTISGQGQETAQIGAAFAFDLDKDYALPYYRDLAVVLAFGMTAKDIMLSAFAKAEDPNSGGRQMPAHFGQKSNRIVTQSSPVTTQFPHAAGIGLAAKMAGDEIAIYASTGEGSSNQGDFHEGINFASVHKLPVVFVIHNNQYAISVPASKQYAAEKLSDRAIGYGIPGERVDGTNMGEVYAAFKRAADRARNGEGPTLIETVSYRFTPHSSDDDDSSYRSREEVNEAKGKDPLTIFQTELLEEGYLTEEKIAEIEKNIAKEVNEATDYAESAAYAEPESSLLYVYDEEANS

SEQ ID NO: 1004 - protein, 475 aa, Listeria monocytogenes
VAKEYDVVILGGGTGGYVAAIQAAKNGQKVAVVEKGKVGGTCLHRGCIPTKALLRSAEVLQTVKKASEFGISVEGTAGINFLQAQERKQAIVDQLEKGIHQLFKQGKIDLFVGTGTILGPSIFSPTAGTISVEFEDGSENEMLIPKNLIIATGSKPRTLSGLTIDEEHVLSSDGALNLETLPKSIIIVGGGVIGMEWASMMHDFGVEVTVLEYADRILPTEDKEVAKELARLYKKKKLNMHTSAEVQAASYKKTDTGVEIKAIIKGEEQTFTADKILVSVGRSANTENIGLQNTDIATENGFIQVNDFYQTKESHIYAIGDCIPTIQLAHVAMEEGTIAANYIAGKAAEKLDYDLVPRCIYTSTEIASVGITEEQAKERGHEVKKGKFFFRGIGKALVYGESDGFIKIIADKKTDDILGVSMIGPHVTDMISEAALAQVLNATPWEVGNTIHPHPTLSESFREAALAVDGNAIHG

SEQ ID NO: 1005 - protein, 355 aa, Listeria monocytogenes
MSFDVLTINPGSTSTKLAVYQGDKVLFEETVRHTMQELADFNNVQEQFDFRWQVLRRVMDAHGYDVKKLQAVVGRGGLLRPVAGGTYMVTEKMIDDLKENKYGEHASNLGAMLAKKLADELTIPSFIVDPVVVDEMQEIARISGNAFVTRKSIFHALNHKAAGRKIAKELGKDYEKMNFVIAHLGGGISVAAHRQGKAVDVNNALDGDGPFSPERSGSLPMNDFLEACFSGKWTKRELHELIVGRGGMISYLGTNSMLEVEAKVQAGEEKAIEAFDAMAYQVSKEIGACSVVLQGKVDAIILTGGLARSELFTSKIIEQTNWITSVIIEPGEDELEALNSGVQRVLAGLEKEKEY

SEQ ID NO: 1006 - protein, 288 aa, Listeria monocytogenes
MTKSRFFSDVAETSSFVFAVAGADDEVVLETIRLALKQKLGKFLLFGKKEDKTLTANESVTWIQTDTAEAAAQGAILAVKNKEADILVKGFIPTATLMHHVLKKENGLRTDQLLSQIAIFDIPTYHKPLLITDCAMNVAPKTKEKIAITENALAVAHQIGITNPKIALLSAVEEVTAKMPSTLEAQEVVQHFGNQISVSGPLALDVAISKEAALHKGITDSSAGEADILIAPNIETGNALYKSLVYFAGAKVGSAVVGAKVPIVISSRNDSPENKLASFILTVRLVEK

SEQ ID NO: 1007 - protein, 563 aa, Listeria monocytogenes
LLQEMTIKNFAIIESLSLTFQEGMTVLTGETGAGKSIIIDALGLLVGGRGSADFIRHGEERLELQGLFALAEDNLACRNALIENGIDASDDMVVLERSLFRSGKNSCRINGKLVTTVLLRQIGSKLIDIHSQHEHQELMNEEFHLSLLDRFASDKIKPALTKYQTNFKEYQTIEKEWQNWTKNERELAQRLDMLRFQQQEIENADLQAGEEDRLLEQKNILANFEKLNENLQGAYAAIQGEPGGLEFVGEAMRQMETAASIHTDYKAVSEAISSSYYMLEDSMSQIRQSLDQLEFQPEELNQIESRLNDLNQLKRKYGKTIEDIIQYEQEISSEMEKLTDSESHVGHLETKLATLKTELTKQAATLTDIRKKAAVTLEKQIKQELNQLYMEKAIFSVRFEANKMELTELGQDSVVFYMSTNPGEPLKPLAKIASGGELSRMMLALKTIFSRHQGITSIIFDEVDTGVSGRVGQAIAEKIYAVSVGSQVLCISHLPQVAAMANHHYYITKKVQNKRTTTSVTVLKGVEKVEEISRMIAGIEVTELTKQHAKEMIEQAEKVKQTY

SEQ ID NO: 1008 - protein, 149 aa, Listeria monocytogenes
MNKGHRHIIIRELITSNEIDTQEDLVELLLERDVKVTQATVSRDIKELHLVKVPTQTGGYKYSLPADNSFNPHQKLKRALIDCFIGIDNVQFMIILKVMPGNGNSVGALIDNLDWPEKAGTICGDDTCLIICRSEENAKTLTDRFIDML

SEQ ID NO: 1009 - protein, 274 aa, Listeria monocytogenes
MTIKKERADILLVEQGLFETREKAKRAIMAGIVYRKEERVDKPGEKIPIDSELQVKGKQMPYVSRGGLKLEKALQVFDFEVKDKLMLDIGASTGGFTDCALQNGARHSYALDVGYNQLAWKLRNDDRVTVMERTNFRHVKPADFAEGLADFATIDVSFISLKLILPVLRTVLVTGGDVMTLIKPQFEAGREQVGKKGIIRDPAVHESVVEHIVQFALDNGYDLMGLDYSPITGGEGNIEFIAHLKWTGEETGISHLEPDAIAKLITKAHTKLDK

SEQ ID NO: 1010 - protein, 604 aa, Listeria monocytogenes
LDLLKIKDPSFMKRLDIQELEALAADIRAFLITSTSKSGGHIGPNLGVVELTIALHYSFNSPKDKFIWDVGHQSYVHKILTGRANQFGTLREHGGLDGFPKRKESIHDVFETGHSSTSLSAAAGMVIARDIKKEDFYVIPIIGDGALTGGMALEALNHIGDMGKDMIVILNDNDMSIAPNVGAIHNILGKLRTSDTSKQTKTNVDGAFFEELGFMYLGPIDGHDIEEVITNLELAKRAKGPVLLHIVTKKGKGYQPAELDSRGTWHGTGPYKVETGSFIKPAKRAASWSSVISNELIRLAEMDERIVAITPAMPVGSKLEKFAKAFPERFFDVGIAEQHATTMAAGLATQGMKPFLAIYSTFLQRAYDQLVHDVCRQKLNVVIGIDRAGLVGADGETHQGIFDISFLNSIPNMTISMPKDEVEARQLMDTAFSYNDGPFAIRYPRGEAPGVQVVESNTLIPIGQWETIIQPLDAVILTFGPTIELALKAAEQLEIEGYRVGVINARYIKPLDEALLHKILKQKIPILTVEESLLKGGFGASVLEFIEANNYRDVIMHRIGLPDEFISHGSVSIILESFGISTTGLVLKIKEMLAQSGKLRAKRL

SEQ ID NO: 1011 - protein, 293 aa, Listeria monocytogenes
LQDLTLFLEQYKKVIDESLFKEINERNIEPRLKESMLYSIQAGGKRIRPMLVFATLQALKVNPLLGVKTATALEMIHTYSLIHDDLPAMDNDDYRRGKWTNHKVFGDATAILAGDALLTLAFSILAEDDNLSFETRIALINQISFSSGAEGMVGGQLADLEAENKQVTLEELSSIHARKTGELLIYAVTSAAKIAEADPEQTKRLRIFAENIGIGFQISDDILDVIGDETKMGKKTGADAFLNKSTYPGLLTLDGAKRALNEHVTIAKSALSGHDFDDEILLKLADLIALREN

SEQ ID NO: 1012 - protein, 450 aa, Listeria monocytogenes
MEQDKYLTVAAITKYIEKKFEVDPYMKQVFVRGEISNLKQPASGHLYFTVKDEFAMLRSVMFHKAVQKIGFVPEDGMNVLVTGRIGVFTKAGRYQFYAEHMEPDGVGALYIQLEQLKAQLEKEGLFAETHKKVLPSFPSKVAVVTSKTGAAVRDILTTIHRRMPSVEVIVYPTIVQGEKAAQKIVENIGKINQRNDIDVMIIGRGGGSLEELWAFNEEPVVRAVYDSDVPVISAVGHETDFALSDFSADVRAATPTAAAELAVPDYRDLEERLAERKYRLLAVTRQALERKERSLEQLKQHLILNGPKHQLEQQMERTDYFSERLNNAFSKQIFVKQTAFDRLNDRLHYYHPNKEIELQKEQMTLHLQALDKAMKQLLKDKQQSFFRQVDALEHLSPLSLLKRGFGVTYKENTLVKSVQELEVGDNIQVKMQGGHIDALITAKEEDISGN

SEQ ID NO: 1013 - protein, 284 aa, Listeria monocytogenes
MGEIIDGKKLAKEIQEKVTREVAELVKEGKQPGLAVVLVGDNQASRTYVRNKQKRTEEAGMKSVLIELPENVTEEKLLSVVEELNEDKTIHGILVQLPLPEHISEEKVIDTISFDKDVDGFHPVNVGNLFIGKDSFVPCTPAGIIELIKSTGTQIEGKRAVVIGRSNIVGKPVAQLLLNENATVTIAHSRTKDLPQVAKEADILVVATGLAKFVKKDYIKPGAIVIDVGMDRDENNKLCGDVDFDDVVQEAGFITPVPGGVGPMTITMLLANTLKAAKRIWKMN

SEQ ID NO: 1014 - protein, 128 aa, Listeria monocytogenes
MKRREAREKALQALFQIELNEMSLDQAIKNIMEDEQDDYMEKLVEGVMANKAEIDAIIEPNLDNWRMDRLSKVDLSLLRLSVYEIKYLDDVPNRVSLNESIEIAKIYSDEKSSKFINGVLANIAPEDK

SEQ ID NO: 1015 - protein, 135 aa, Listeria monocytogenes
MAYTKDLRKQNDAPLGKIEIAPEVIGVIAGLAASEIENVAYMQGGFATEMREKFSGAVNYRKGVKVELTEEGILIELYCSVLFGATIPLVAQNIQDAVRDTIFNMTGLNVLEINVHIVGVQFEKTETLSFDDFEL

SEQ ID NO: 1016 - protein, 454 aa, Listeria monocytogenes
MIKKVLVANRGEIAVRIIRAAKELGVETVAIYSEADREALHIQLADEAYCVGPAATKDSYLNMSNIISLAVLTNCDAIHPGYGFLAENADFAELCEDCNITFIGPSASAISQMGTKDVARETMRKAGVPIVPGSQGIVADVEDGKKIAKKIGYPVIIKATAGGGGKGIRVAENEEKLISGIHTTQQEAEAAFGDPGVYLEKYIQDFRHVEIQVLADNHGNVIHLGERDCSIQRRLQKLIEESPSPAIDEKTRQKMGKAAVKAAKAVNYSGAGTIEFIYDHHENNFYFMEMNTRIQVEHPVTELVTGIDLVKQQFLVASGEELQIKQADVKLTGWAMECRINAENPEKNFMPAPGEIKFYLPPGGLGVRIDSAAYPNYKIPPYYDSMIAKVICYAETREEVIQKMKRALSEFAIDGIPSTIPFHLRVLDNDVFLSGDFNTKFLEQNDVMNLSKEG

SEQ ID NO: 1017 - protein, 155 aa, Listeria monocytogenes
MLSIDEIKQLIELIDESTLDEFELETKDSKILLKKHKTVVATAVQEAPIAVTPAQTAPVTPAAAPQVEASTAEDVNLEVITSPMVGTFYASASPEDANFVSVGSKVSAQSVVCIVEAMKLFNEITADIDGEIAEILVSSGELVEFGQPLFKVRKK

SEQ ID NO: 1018 - protein, 185 aa, Listeria monocytogenes
MISVNDFKTGLTIEVDNGIWRVLDFQHVKPGKGAAFVRSKLRNLRTGAIQEKTFRGGEKVAKAQIDNRKMAYLYADGTNHVFMDNESYEQIELPEDQIAHELKFLKENMEINIIMYQGETIGIDLPNTVELVVTATDPGIKGDTSSGGSKPATLETGLVVQVPFFVNEGDKLVINTTEAAYVSRA

SEQ ID NO: 1019 - protein, 282 aa, Listeria monocytogenes
MNKNKTGWNIAKIIVGALIFSLAVNVFAIPNNLGEGGVTGLTMMLYYLLGWTPAITTFIFNGILLIIGYKFLDRMTIVWTIVAISFTSIFLHFSEPLAFVANQTIVAAIFAGLMMGIGMGLIMNGGGTTAGSAILAKIANKYLGWNTSYALLFFDLLVVIPSVFVIGFENMLFTIVSLYISTKVLDFILEGYNPKKSVTIISDYYEEIATEIDANLERGITLFNGQGFYMRQDKKILYIVISRDQLLPLTKIVNKYDEKAFFIINDVQSVVGEGFTKQITSE

SEQ ID NO: 1020 - protein, 219 aa, Listeria monocytogenes
MKQNILNNYVSTNDFPVITRGKRKYLTYEGLEDSYVYILKKGIIKTSIISRDGREFNLNYINKMDIISLLKDEYSQFANAPFNIRVESDTAELYQVDRVRFWKDVNRDVDLQIYVKDYYRTRLLQSIKKMQQMLMNGKLGAICTQLYELYTLFGVEIAPDQFLIDFLVSNEEIGHFCGINSASSVNRIFQQLKKEGVITMQNRYIIIKKLDVIQENVIF

SEQ ID NO: 1021 - protein, 401 aa, Listeria monocytogenes
MKEKLFNKGFVLITLINFVVYLVYYLLMVIIAVIAQEELNASLGEAGFASGIYIIGTLLARLYMGKKLELFGRKRVLRFGILFFLITTMAYLYMPTIAIMFIIRFLNGFAYGTTSTATNAIVTAYIPNSRNGEGINYYGLSTSLAAAIGPFIGMILLSKTSFYTIIIFSTVIVLLTALLCFYLPVKNIILTNEHRKALQTWTVKSFIEYKVIPITFIAFLMGISYSSVLTFLASYAREINLVSAGTFFFVVYALVITFTRPMSGKLFDAKGEKYVMYPSYIFLAVGLVVLSTATSSLVLLISGGLIGLGYGTFMSNGQAVCLKVCEPHRIGIGLSTYFIGLDLGLGIGPYIMGEIHHVLSFQGIYIIAGAIAFICVFIYMFLSRKKVSSGAQEQLKGSEEV

SEQ ID NO: 1022 - protein, 81 aa, Listeria monocytogenes
MNKLLLITAAGYIVGVRSIEKENNQSILLNDVYINNPSQRLIDHFESLEIAKEQVIGHKKLSTDDAQNLISRWEASYFTTS

SEQ ID NO: 1023 - protein, 158 aa, Listeria monocytogenes
MYKYTLCFLQRADEILLLNRQKSPWMGSWNGVGGKIEQGETLLESVQREITEETGISSNDYEIRDIGEMKWFVDGENLGGMHLFLANLPDNYVYPTPRTTDEGILDFKKRKWILNPENTGVVNNLPYIIEHAPVFPARIEVSTKYQENTLLHISHQSL

SEQ ID NO: 1024 - protein, 87 aa, Listeria monocytogenes
MERPDNQLILMVLEVVKNPIYNIKSLTINFLQGDIVGNSTRNELLYCTYWLEFHGFILRDEKGDNQKYYSMTKQGDFLLQKIKNELS

SEQ ID NO: 1025 - protein, 470 aa, Listeria monocytogenes
MNNLKLSEEIKRAINELGYTEATPVQKAVIPVALTGEDIVAKSQTGSGKTAAFAIPIAEQVEWEENKPQALIIVPTRELAMQVKTECTNIGRFKRVKAAAIYGQSPFAKQKLELSQKNHIVVGTPGRLLDHIEKGSLNVDKVAHLVLDEVDEMLSMGFIDQVEDILSRLPKQRQNLFFSATMPEEMQDLIKRYQDNPMVIEMASEKTNPIFHVEMQTDNKEKTLKDVLITENPDSAIIFCNTKNQVDELTDLLDVKASKIHGGLRQEDRFRAMDDFKSGKSRFLIATDVAGRGIDVDNVSLVINYDLPIEKENYVHRIGRTGRAGKSGKAISFVKTNENPLLRDIEEMLDVTIEKKRKPTVIEVKVNEDAFRKKQQKRPTIKKARGEKLNKNIMKLYFNGGKKKKIRAVDFVGTISKLEGITAEDIGIITIEDHVSFVEILNGKGPAVLEMMRSRKVKGRRLKVNEARKR

SEQ ID NO: 1026 - protein, 199 aa, Listeria monocytogenes
MKKTLYLMRHGQTLFNQRKKIQGFCDAPLTDLGINQAKIAGSYFKENNITFDQAYSSTSERASDTLELITDKSYLRLKGLKEWNFGTFEGESEDLNPPLPYGDFFATYGGEREVDFRDRLVATMEHIMSQDNHDTVLAVSHGAACAQFARHWGKTSTIGKVTGLKNCCILKFEYENGRFTLVNFINHDFDKGTHIESTK

SEQ ID NO: 1027 - protein, 383 aa, Listeria monocytogenes
MMINNEIREVIGLHPIFENDQKLTVENAEVIIRNHVLIKLILDQADCYKEIDYNIELTDTNELVGRKNAKPKALTLKAILKAKTKELRLKINKVSHRIELKLGVQHFENIYFEKGMVFTRENVQTKITENYGSDWLGTLDKAKLKVKTRQTIQQGSIFSYPIGNEYGFGLVIGCFQMFRKQKIMPQDSSHYLNLMMGVPLVIRSFNYTSKQNTVDLPLLKKRQLLNPEFIMDDLVLRGDFPIIGRVVLEEADILFPMNFSFNGVSTTYAGYQAIDEPDRDIIKKYEEEITIRFDWGFGSKTMTAKEFLKRRSGKESFLSYSGLGMTPIAGYSKKLISPKTIFTPEELKQIYEVLDIDGEISFDDFNEKHNGILAQNMLSIDGK

SEQ ID NO: 1028 - protein, 135 aa, Listeria monocytogenes
MTLNVYLNFRTQSRDAIAFYEEIFGTKCTDLMTYGEIETSEKPIEDSLKDLVMNASLVMDGVKVMFSDVPKSMPLTFGDNITFVIDTSDEIKLTKQFHQLAEGGNVVMPLAKTFWSEKFGEVTDKFGVGWKLNLS

SEQ ID NO: 1029 - protein, 197 aa, Listeria monocytogenes
MAKTELNPKVDAFLNKPSKWQAEFKTLRDIAIGFELEEELKWGKPCYAINGSNVFLIHGFKNYCALLFMKGALLHDPENILVQQTENVQAGRQIRFTNLQEILDQKEILKKYIQNAIEVEKAGLEVELKPREETPIPEELFAKFEEMPALQTAFEALTPGRQKAYLLYFAAPKQSKTRVSRIEKYEATILDGLGLND

SEQ ID NO: 1030 - protein, 452 aa, Listeria monocytogenes
MKKMLPESKVEAIRKEGFLNRAVEAYRFFYPTVSNVSNFKALNDLGITENHDFIIQLTTPDLNVLTQNSDTPYCLGTGNTENGPVVIELPQGAIVGVADDINFKFITNMGLTGDEQGKGAKYLYLPPNYDGDIPDGYIVRKPSSYRFLICLRAMVHQASDYEKAFELLKKVKFYPLEEKDNNSTSTFHDFSHRKAISTPYYVEGKFDYWEVIKWALDNDETDPEYYQMYGLLKAIGLAPNKEFNPDIDKKALLIEAAEKADKMMFVNSFNTDDPAAIVWPGKNWEWAVYGENNDFYEKTYLNLPVRERWFYQATLETHMMFMHKVGFGSVYMLGVKDREGNYLDGGKSYTLKVPTPVPTSIFWSVTVYEMDTRSEIVTEQFMPALNSIKDTFEVDADGNTTLYFGPNPPEDESLPWIQTVPDANWFTYFRIYGPTEPAFDNSWQLYDFEEVK

SEQ ID NO: 1031 - protein, 174 aa, Listeria monocytogenes
MKLLVVSDSHSERDCLIHLKEKYENTVDAMIHCGDSELEADDPAIQGFHTVRGNCDFGGGFPNDWVGEVDGYRIFTTHGHLYNIKMTLMNLRYRARELNADFAFFGHSHELGVDMLDDTIILNPGSISLPRGRIRVKTYALIDSTPEGIQVRFMDRDDNELTDLTQTFPLTKRN

SEQ ID NO: 1032 - protein, 203 aa, Listeria monocytogenes
MSKIIIATANKGKAKEFEKIFAKFNIEVATLADFPEIGEIEETGTTFAENAALKAETVASVLNQTVIADDSGLIVDALDGAPGVYSARYAGVAHDDAKNNEKLLKNLEGVEPDKRTARFHCTLAVATPSEKTSFYTGEVEGVIAEQLCGTNGFGYDPLFFLPEFGLTMAEIPAEKKNEISHRANAIKQLEKDLVEVVEKVTKK

SEQ ID NO: 1033 - protein, 248 aa, Listeria monocytogenes
MRVDGRESNALRNIEVTPDYLMHPEGSVLIASGNTKVICSASVETKVPPFMRGEGRGWISAEYSMLPRATNTRNIRESSKGKVTGRTMEIQRLIGRALRAVVDLDALGERTIWLDCDVIQADGGTRTASITGAFIAMVMAIAKLDEAVPFAKFPVKDFLAATSVGVLEEGGTVLDLNYVEDSAAQVDMNIIMTGSGAFVELQGTGEEATFSETELAELIALGKKGISELIEIQKETLGDKVTARIKGE

SEQ ID NO: 1034 - protein, 266 aa, Listeria monocytogenes
VKQAIGFIDSGVGGLTVVREVLKQLPHEQVYYLGDTARCPYGPRDKEEVAKFTWEMTNFLVDRGIKMLVIACNTATAAALYDIREKLDIPVIGVIQPGSRAALKATRNNKIGVLGTLGTVESMAYPTALKGLNRRVEVDSLACPKFVSVVESGEYKSAIAKKVVAESLLPLKSTKIDTVILGCTHYPLLKPIIENFMGDGVAVINSGEETASEVSALLDYHNLLDATDEEIEHRFFTTGSTQIFKDIAKDWLNMPDMTVEHIKLGK

SEQ ID NO: 1035 - protein, 164 aa, Listeria monocytogenes
LVIMVYESGVSEMTENEQNKHEEKALVPSFGLDLLRDYLIPELLGDEAPHIMYWAGKDLARKFPLDSLEEVAEFFEEASWGNFSILKEKKDEMRLLLEGETVAARFRTQEEPTFKLEAGFIAEQLQSQKKLYTESYDEIDKRKKQVTIIVKWDRKETIDNEERY

SEQ ID NO: 1036 - protein, 404 aa, Listeria monocytogenes
LGLVVLKFGGTSVSTVDKIGKTADQAIYEKKQGNKVIVVVSAMGKSTDKLVAMAEEISEAPDKREMDMLLSTGEQITIALLAMTLKEKGHDAISYTGWQAGIETEAVHSNARIADIDSARIESALDAGQIVVVAGFQGFTTDGEITTLGRGGSDTTAVAIASALNAEKCAICTDVVGVFTTDPRYVKKAQKLEQITYDEMLELANLGAGVLHPRSVEYAKNFRIPLEVRASHEQVPGTMIEEDLTMENTKVVRGIAFEDQITRVTIHWKQKEAMRVSKVFTKLAENNIDVDIIIQGITGLGHGNLSFTIKTSALLATLAVLEESKELLQIEKLESEQELAKVSIVGSGMVSNPGVAAQMFEALTENNIPIKMISTSEIKVSTVVPARKMVEAAQVLHDQFELDK

SEQ ID NO: 1037 - protein, 115 aa, Listeria monocytogenes
MYIKDFATKTGLSIDTLRYYEEEKLLIPARNEKNYRVYTEEDYCWVQLLLKMKQTEMTITNIKNFATLQKQGDKTLPNRIQILDNHMENLYEQQKDLAETISFVAKKVDGYREKL

SEQ ID NO: 1038 - protein, 603 aa, Listeria monocytogenes
MSSEHIQNKLALLPDQPGCYLMKDRQGTIIYVGKAKILKNRVRSYFSGTHDSKTQRLVQEIVDFEYIVTSSNVEALLLEINLIKKHDPRFNIRLKDDKTYPFIKITNERHPRLIITRQVKKDKGKYFGPYPNVYAANEVKRILDRLYPLRKCSTLPNKVCLYYHLGQCLAPCVFDVEASKYKEMQDEIVAFLNGGYKTVKNDLMKKMQEAAENMEFEKAGEFRDQINAIETTMEKQKMTMNDFVDRDVFGYAIDKGWMCVQVFFIRQGKLIERDVSQFPFYNDADEDFLTFIGQFYQKANHIPPQEIYLPNDVDSEAVQAVVPDTKIIVPQRGNKKDLVKLAYKNAKIALNEKFMLLERNEERTVGAVERLGEAMGIPTPSRVEAFDNSNIHGTDPVSAMVTFLDGKPSKNDYRKYKIKTVEGPDDYATMREVIRRRYWRVLKEGLPMPDLILIDGGKGQIDSAKDVLTNELGLDIPVAGLAKDDKHRTSQLLFGDPLEIVPLERNSQEFYLLQRMQDEVHRFAITFHRQLRSKTGFQSILDGIPGVGPGRKKKLLKHFGSMKKLKEASIEEIKEAGVPLNVAEEVHKHITAFNEKAKNTEQK

SEQ ID NO: 1039 - protein, 103 aa, Listeria monocytogenes
MVKEITDATFEQETSEGLVLTDFWATWCGPCRMVAPVLEEIQEERGEALKIVKMDVDENPETPGSFGVMSIPTLLIKKDGEVVETIIGYRPKEELDEVINKYV

SEQ ID NO: 1040 - protein, 785 aa, Listeria monocytogenes
MEKKVEAILEFDKIKKQLTEFASSSLGEQAILELAPATDFQVVQKTQLETEEGAKIIRLRGSAPITGLTDVFAHLKRLEIGGDLNGLEIYQIGSNLRVSRQMKNFMNDLLEIGVELPILGALSDELLVLKEVEEDIAISVDESGKVLDTASEALSTIRRTLRRTEDRVREKLESYLRDRNASKMLSDAVITIRNDRYVIPVKQEYKGHYGGIVHDQSASGQTLFIEPQSVVDLNNERKALQAKEKQEIERILAEISASLAAWINEIHHNTFILGRFDFIFAKARFGKAMKAVTPHLSDAGVVHLIAARHPLLDAAKVVANDIYLGEDFTTIVITGPNTGGKTITLKTLGLLTLMAQSGLQIPAQEDSTIAVFEHVFADIGDEQSIEQSLSTFSSHMTNIVSILEKVNQKSLILYDELGAGTDPQEGAALAIAILDASHEKGASVVATTHYPELKAYGYNRVHATNASVEFNVETLSPTYKLLIGVPGRSNAFDISRRLGLSENIITEARSLVDTESADLNDMISSLEEKRNLAETEYEEARELARGADNLLKDLQKEITNYYQQKDKLIEQASEKAATIVEKAEAEAEEIIRELRTMQLNGAAGIKEHELIDAKTRLGNAKPKTINKTIPQAPKQKPHVFQEGDNVRVLSLGQKGTLLNKISDKEWNVQIGIIKMKIKTADLEYIQPEKPKKQRIITSVHSSGSPAKSELDLRGERYEDALQKVDKYLDEALLAGYPQVAIIHGKGTGALRTGVTEYLKNHRMVKSIRFGAAAEGGNGVTIVEFK

SEQ ID NO: 1041 - protein, 570 aa, Listeria monocytogenes
MATNKKEIIRLLEEIATYMELKGENSFKISAFRKAAQAIELDSRSLSEIDDFTKISGIGKTTGEIIQRYLDSGECPELEELKKEVPAGLVPLLDVPGLGGKKLSRLYHELGVVDKDTLLQEAENGHIEALKGFGKKSAEKMAEAVREMGERPDRYPLNDVLPIIQKVEAYLAEIAPIETFAQAGSLRRLRETVKDLDYVIATEKPEDVQKALLAFPLITDVIGAGETKVSAVLEDNITISVDFRLVEKKAFATTLHHFTGSKDHNIKMRQLAKQSNEKISEYGVEQEDGTVRHFESEKTFFEHFKIPFLPPEVRRDGTEIERVTKDTKFLELSDIRGDLHMHTTWSDGAYAIPEMIEACIAKGYEYMVITDHGKFLRVANGLDEKRLLEQQAEIKKIAAKYPEIDVYSGVEMDILADGSLDFDDETLKQLDFVIASIHSSFQQSEEEIMKRLKTACENPYVRLIAHPTGRIVVKRKPYHVNMKELIQLAKSTGTALELNANPQRLDLNREHLEMAHAAGVPIAINTDAHDTKHLDFMSIGVRAATKAWLGKSAILNTKTAAEFKQFLQNK

SEQ ID NO: 1042 - protein, 180 aa, Listeria monocytogenes
MILNAIILILLVCGFFAGFRTGLIKQLILLLGYILAFFISYTYYEDLAPHLTFIPYPGSDTADGLSIILQELRTETAYYNVLGFAIIFIVAIIVVHMLASLVGGLTKIPVLRQINGLLAAVFGVIKSYLIIFVVLFIMAIYPANWSENLIDSSTVAQWMLENTPILSEQFYDWMTDILPK

SEQ ID NO: 1043 - protein, 256 aa, Listeria monocytogenes
MFSVTTFNIRFDDTSERKKSWELRKTLTKSLLDKYQWDFMGVEEPLLPQMRDMKEMQDWDYFGVGRDDGFEKGEFTAVFYNSTRFTLLQEGHFWLSETPDVPSIHSTAMFPRICVWGKFADSDGKQFYIFNTHLDHISEEARLFASQLLLKKAATIAENSPVIILGDFNTEPDTPTYNFITKKYQDAQLISQKHAKGPIGSFHDFRPLRPINELEKIDYIFVSEEFQVCTYETIVDEVDGFSASDHFPVTANLDWK

SEQ ID NO: 1044 - protein, 102 aa, Listeria monocytogenes
MYLKENTNYLYCTAVIQTTGKVSYEQLVEHLEALRAKTVKEPGCVLFEIVPLESALGRFALWEIWQNQESFYYHHEQNYTKEFFAAELDTVEFFESSEKVNL

SEQ ID NO: 1045 - protein, 130 aa, Listeria monocytogenes
MFDKLMGKAAIVTESSYGIERFLDEDEQIIQIFKFIRDEVIITSKGIFNIDAQGITGKKVEYKFFPKKALKYVSIETAGTLDRDFDLKIGVDGNTVVTQNTSFSAPISLKVHKNDTEMGFALYKMIKGML

SEQ ID NO: 1046 - protein, 219 aa, Listeria monocytogenes
VGSAFSAILSPAVGILISPFPIVGLILILLSNKARINSIFYTVGWIVGNIAIFFIGLFLMSSAVSSSGDQSTLVKVVLIVLGALLILLGAHDFTKRPKNGEKAATPKWFEKMSNIKPGGAMIFAFVLSAVNPKNMLLSLTAGVSVGALNLSGGQETTATIIFGIIACCSIYVPTIAFLLAGSKLNNVLDSTRKWLIQNNSVIMAVLFLFIGLSVISKAF

SEQ ID NO: 1047 - protein, 471 aa, Listeria monocytogenes
MHTNTGFPADFLWGGAAAANQFEGAYNVDGKGLSVQDVTPKGGFGHITDGPTPDNLKLEGIDFYHRYKDDVKLFAEMGFKVFRTSIAWSRIFPNGDETEPNEAGLQFYDDLFDELLAHNIEPLITLSHYETPLHLSKTYDGWVNRKMIDFYENYVRTVFNRYKGKVKYWLTFNEINSILHAPFMSGGISTSPDKLSQKDLYQAVHHELVASALATKIGHEIMPEAQIGCMVLAMPTYPLTSNPDDIIAVMEAERKNYFFSDVHVRGTYPGYMKRYFRENNIELDVTEEDLEILKNTVDFISFSYYMSTTETADESKRKAGAGNILGGVQNPYLEASEWGWQIDPQGLRVVLNEFWDRYQKPLFIVENGLGAIDQLEKDENGNYTVNDDYRINYLSAHLSQVKEAIKDGVDLMGYTSWGCIDLVSASTAEMKKRYGFIYVDRNNDGTGTLNRYKKKSFDWYKNVIATNGEDL

SEQ ID NO: 1048 - protein, 214 aa, Listeria monocytogenes
MRAELAVYFIAGTQDIVRGTLPSVLEEALKGGITCFQYREKGAGSLQTASERKEMALECQKLCAKYQVPFIINDDVALALEIGADGIHVGQTDEAIRQVIASCSGKMKIGLSVHSVSEAKEAERLGAVDYIGVGPIFPTISKADAEPVSGTAILEEIRRAGITIPIVGIGGINETNSAEVLTAGADGVSVISAITQSDDCHSVIKQLKNPGSPS

SEQ ID NO: 1049 - protein, 267 aa, Listeria monocytogenes
MTFPQVLTIAGSDSGGGAGIQADIKTFQERRTFGMSVITAITAQNTLGVKAVHKIPVEMIREQCDAIAEDFQVSAVKTGMLADAEIIREVVRNIRLHNFPNLVIDPVMIAKGGTALLENEATQVLKDELLPLGTIITPNIPEAEEILGEKITTKAEIERAAKKIYDMGVKAVVIKGGHSEMTEAADFYFDGVTAKWLTSERFDTPHTHGTGCTFSACIAAELAKGNSLLDSVMVAKEFISSAIKYPLGIGHGHGPTNHFAYRMEDGK

SEQ ID NO: 1050 - protein, 269 aa, Listeria monocytogenes
MFDFMTLEKVREKGPLVHNITNIVVANDSANGLLAIGASPIMASAKEEMDELAKMADVLVINIGTLDGELVTAMKIAGRAANVAGTPVVLDPVGVGATSYRRKVVQELLAEIQFAAIRGNAGELAAIAGEAWEAKGVDAGVGSADVLSIAGKVANEWSTVVIISGEVDVISDGTRFAKVANGSALLPRITGSGCLLSAVCGSFIAVQDDAFRASVEACASYAVASEYAEMELERKLPGSFRPLFLDALASWSVEKTRAKAKIQESGEHK

SEQ ID NO: 1051 - protein, 224 aa, Listeria monocytogenes
VFIHGFQEEVGNLWQETLRHPFVRSLADGTLEKEAFYYYLLQDDYYLSHFEKVIEKSVEQAGTAELAAEMREVQVRLQQSELLMREQFYPRVGLTERDFSERKPAPTAYHYTSHLHRMVDFGSFGVTIAALLPCYALYADIGKMYEGARSSEPFYQELLDSYVDENYQKVVLQQKRLVEQAASMADARELALMKQAFQISVEMEWAFFDMAYKKQNWRGSVNYV

SEQ ID NO: 1052 - protein, 261 aa, Listeria monocytogenes
MPKLIIDADDFGLSKAINHGIIESYKTGITTSTLLMPNLETAEHAIALAKNHPDLFIGQHTNFLLGKPCANPAEIPSLVDENGEFHRSKYYRANPELKFQYEDVRTETIAQMERFKALTGHYPEHIDCHSIGDETVDQAFFDIAREFGIHTTLKYSGDKKWSDQEGYLPITKLLESGALPYTNGGVSVENFLNDDFGLLKLAPNEIAEMHFDVGFLDQFVLDNSSYTLMRCRELATICDVRVRDWLLENGFELITFGDLQR

SEQ ID NO: 1053 - protein, 248 aa, Listeria monocytogenes
LRNMGYIDLHVHIDFYSEPIKIAREYERLKIYVIFVTYLPEIFLKTRYEYDNYKYVRLGVGFHPDMVGEYDFDKNAFERGLQYTRYIGEVGLDFSKSNQQFKEQQIEIFQQITSPKYNKGNVYSIHSRKAEVEVLQILKSNNVKSAIFHWYTGGKHMLKDISDSGYFFSVNHKMLTSKNGIDIIKSIPKSQLLFETDGPFARKEKSIVYPSNFKQIYADFEEVIPGFEKIVFSNFKRLLFQKDIDKIN

SEQ ID NO: 1054 - protein, 400 aa, Listeria monocytogenes
MSEIQHFSEFIDGATNYWYKNKFDRCNACDMVNVMLTVFDGDISTPGNQSNKIPRRISVSAKVYDVDRWNQSREELIELLNWVSGDLFEMSFEKNEELFDAFPLELPSPRKECITLFSGGLDSFAGSYYNFLNNISSDYVGYVNKAEERTYQKRLQSFYRKIFSAGGSEVDIRNKYQKPKIFYFQSTRSLLYLSLAISKAISNSVKEIRMYENGILSLNPEFGRYTTKTTHPKTIFLYNKLLDTLGYDIRIVNKFEYETKGEIVENMNLEFKSQIKNTFTCGKSRVGKEYNHTGQCGACIPCILRKISLAAYDNEHFDAKYFVGYKNVASASEKYLKDYINNIGYFDAYVEAIKNEEIFGEISNNQHKFHKENNYLRYQKVMFDKFASEYERFIAKYGIH

SEQ ID NO: 1055 - protein, 206 aa, Listeria monocytogenes
MGTNRARIDKSIENILKGKNIEEAKLHLPEITSTIKTGFIEKEISEQVYQSIIGVVSGKLSKIYDLDEDKCKEITSDFIKREQWINEIMELVEQDNVTGISDVLLKALKIALGETVKAEQNETYFVEKLLYEIIFLSLENTMQGALETLEEGITIPQIRKEFIKPLADKLFEEDIKTEIPALVLGKTTLAVINNKIADKLKNFGGF

SEQ ID NO: 1056 - protein, 724 aa, Listeria monocytogenes
MNCEKCNQNPATIQLYMNINGKRVEMPLCASCYAEVRNQANFGSNEFPGASGSPFDDIFRQLSGAANQANREQRSQANAQVQTQTAGGGNGILDEFGTNLTDMAKNEQLDPVIGRDKEIKRVIEILNRRNKNNPVLIGEPGVGKTAVVEGLANAIVAGDVPSKLMNKEVILLDVASLVSGTGIRGQFEERMKQLIKELQERKNTILFIDEVHTIVGAGSAEGSMDAGNILKPALARGDLQMIGATTLKEYRTIEKDAALERRFQPVTVSEPSTKETLTILNGLKPKYEDFHEVVYSPEALTAAVELSARYIQDRHLPDKAIDLMDEVGSKYNLSIEKLDENTVSERVARLEDEKNQALQMEDYEKAAKVRDEITRLEENKTSNSFSERPVIQASDIQAIIEEKTGIPVGRLQEDEQSKMKNLERNLTGKVIGQEDAVKKVAKAIRRSRVGLKSKNRPIGSFLFVGPTGVGKTELGRTLARELFGTSEAMIRLDMSEFMEKHSISKLIGSPPGYVGHEEAGQLTEKVRRNPYSIILLDEIEKAHPDVQHMFLQILEDGRLTDSQGRTVSFKDTVIIMTSNAGATDTEASVGFNTTTETKLEKGSDILAKLGAYFKPEFLNRLDSVIEFKSLEKDDLVQIIDLMLVDLNEMLAQEGVTIDVSKEVKEHLIDLGYDPKFGARPLRRTIQEHLEDTIADSLIDQPEAKNLVATLNDNKEITITEQVTA

SEQ ID NO: 1057 - protein, 159 aa, Listeria monocytogenes
MLKRQKASPVGELFITIEDGCIMNISYDKPRNWELLDGNIIEKELFQELMIQLASYFEGERENFDLPMLLKGTDFQKKVWQALSEIPYGAVVSYKDIAISAGSPKAVQAVGQANRANPIPIIIPCHRCVKSNGELGGYNGTDVDKKQYLLALEKGLSLS

SEQ ID NO: 1058 - protein, 548 aa, Listeria monocytogenes
MSEWTIIGWLLKFVKPLRGKMILAILLGIISNLSVIMISLIGTYGIIAVILQQPLNPYKWLFVMVACGVVRGLARYLEQYLNHDIAFRLLAIIRERIFATLRKLGPARLSGKKSGDLVAAITTDVEALEVFFAHTISPVFIALGTTIATVGFLASYDVGLAIILLVGQIMVGVVLPMISYKRNKKIGTAYQQAFVGLNQMVMENIASLQDIFQFKLGEERLRKLETQGEKLNRQYKKRIRQGSELQILGEWVLIGTATIILVLGSLSQLPLETVLIGTVLSLSSFGSVLALNALGTALLTTFASGKRLYALTEEKPVVLFNGQLELSDFESAELDKVSFSHDGKQPLLNELSLALPKGKWLGIGGESGSGKSTLVKLLMRYWDPDGQVKLNNNELPKITESSLHRLEGVMEQRTFLFEDTLGNNIRLGKKDATLEEVKEAARKAAIDTWIETLPEGYETIIGGQSRNLSDGERQRIGLARLFLHDAPLLLLDEPTSNLDYINEQAILNTLRSEIQDKTVLVISHRATTLDLAEEQLFIENGALKRAAK

SEQ ID NO: 1059 - protein, 343 aa, Listeria monocytogenes
MTQSALKRESYFDNAKFILIFLVVFGHFLQTFIADYAGVRVLYIYIYTFHMPAFVLISGFFAKSFGKPGYLKKTMKKLILPYVFFQLIYSIFYYFLLSKDNLSIQLLDPEWSLWFLLSLFFWNIMLFIFAKIKPWKSICIALFVGLVAGYFDIIGGYLSLSRTLVFFPFFLVGYFLKKEHFYYLKTHFVMILGGIFIVLLLSFITLHPNLNDKWFLGSKPYANFVEVKSLGLFIRALVYLISFGSIAAFFSFIPRKRLFFTKWGKNTLYVYLLHGFFIKFFREGSQTDFQYSPSTFLLLFVVTFVLTVLLSSRLVKIFVQPVIELRVSMLRDVFSRLTKRESY

SEQ ID NO: 1060 - protein, 122 aa, Listeria monocytogenes
MGSRKPEIIIGLIGSIIGILVGFWIINYGDSVTDYIQTFTYLPGELGNELANLGWITLIASVVALIASLLIKSAPRGWGVILVIIGIVLFFVIGTAWIISGILITLTGLMGIFRRPVPKSKY

SEQ ID NO: 1061 - protein, 444 aa, Listeria monocytogenes
LARMTPVQVIIAYYFLAVTISTIVLSLPFTLQKGVKVSFIDTLFTAASSVSVTGLTTVDVSQTYSTAGIWVLMAIFQIGGLGVMMISTFFYLILKRRIGLKQRQLIMTDTNQFTMSGMVRMLREILVLIFGIELIGALILGIYFIPLYPNFWDAMFQGLYNSVSLVTNAGVDITGKSLMPFANDYFVQFISILLIIAGAIGFPVLLETRRFLFEKNTLIPFRFSLFVKVTTLTYFVLLIVGGLLIWLFEYHHFFSGKSWDFGFFNSMFLSATSRSAGLQTIDSGALSISTLLLVSFLMFIGASPSSVGGGIRTTTFAITILFIYSVIRGRKHVYIFGRELHQEDVRKSLAVTLVAGFLSISAIVVLMQTETASLIAVIFEVFSAFGTTGLSVGLTPDLSTPGKIIIIALMFIGRVGIMYSMLSLRNKNQPKNAIRLPKEKIITG

SEQ ID NO: 1062 - protein, 255 aa, Listeria monocytogenes
MDVSIWGEYALVFLVLVVLEGILSADNAVVMAVIVKGLPHDKQRKALFYGLVGAFVFRFVALFLISFLVKIWEIQAIGAVYLLYLAIKHMWRLKKGKQEEVKEASEAKSTSFWGVVARVELTDIAFALDSMLAAAALVVTLPDLGNFDIGGMNGGQFIVMFLGGIAGLVVIRFAATQVVKLLERYPTLETAAFLIVGWVGVKMAVLTLAHPSVAIIPGDFPDSAVWKLTFWSVMIIIGLGGYIIARKKEKKTKRV

SEQ ID NO: 1063 - protein, 255 aa, Listeria monocytogenes
VDTAMILEYGWVLLVLIGLEGILAADNAVVMAVMVKHLPDKQQKKALFYGLMGAFVFRFGALFLISFLANVWQVQALGAAYLLYIAISHIWKHAKGKDGEKEKKEKAGSGFWMTVLKVEIADIAFAIDSMLAAVALAITLPETGWGHIGGIDTGQFAIMFLGGLVGLIIIRFAATQFVKLLKSYPSLETAAFLIVGWVGVKLVIYTLAHPSLGVIPHSFPESTLWKLIFWGVMILIIVWGWFVSYRSKKKTETTK

SEQ ID NO: 1064 - protein, 453 aa, Listeria monocytogenes
MKHSDNYYLTKASIPKAIAHLSIPMMLGMSVGVIYNIVNAFFIGLLHDTSMLTAVTLGLPMFTILMAIGNMFGVGGGTYISRLLGKEEGTKAKQVSAFVLYGSLVLGILCAILLGFLINPVTHFLGADATSFLHTKNYTLALLICSPFIIANFALEQVVRAEGASRVSMNGMLIGTVVNLVFDPLLILYFDFNVVGAAVSVGLASLFSLIYYAWYLEKKSDYLSIRFKWFQASKEIVQNVFKIGVSELLLSLFLIVTTLVLNHYSMIYGEGVVAGFGVALRVVQLPEFICMGLYMGIIPLLAYNYGSGNIARFEKAIRFTAISIGLIVLLLSSLVFIFRFQVMHLFSDSQSVITLGVHIMVAMLISSLFSGFTGLFTSTFQAIGKAIPATIMSVSQGIIFIPVIILGQHYFGLMGVIWSLTATEILTCIIGVTLFTIHNIKIASSAKTKDLAV

SEQ ID NO: 1065 - protein, 141 aa, Listeria monocytogenes
VRREKTMDTLIRSIMIKSKRKMDAKVAQFGLTTQQARVLGFLNDNAANEIIQKDLQRIFQTRGASITSLIQGLEKKQLISRKPSIRDGREKVVTLTEEGKRIVDEFNESFPREDDKAKKILSADEYKIFIDLLSKIDDNTE

SEQ ID NO: 1066 - protein, 522 aa, Listeria monocytogenes
MSQDLQKEVASRKTFAIISHPDAGKTTITEQLLLFGGVIRSAGTVKGKKSGKFATSDWMEIEKQRGISVTSSVMQFDYNGSRINILDTPGHSDFSEDTYRTLMAVDSAVMVIDAAKGIEAQTLKLFKVCRMRGIPIFTFINKMDRQGKMPLELLAELEEVLGIESYPMNWPIGMGKELAGLYDRYHRVIEQYRSEEDERFLPLGEDGDLKEAHAIQKSLYYDQALEEIMLLDEAGNDFSRERIIAGEQTPVFFGSALTNFGVETFLRTFVDFAPAPSSHESNEGVIEADNPKFSGFIFKIQANMNPAHRDRIAFIRICSGEFERGMNVTLTRTGKSLKLANSTQFMADDRETVNRAVAGDIIGLYDTGNYQIGDTITNGSKKLEFEKLPQFTPELFMRVYAKNVMKQKHFHKGVEQLVQEGAIQLFKTWRTEEYIIGAVGQLQFEVFEHRMRGEYNSEIRMEPIGKKIARWVKEEDADEKLSTARSMLVKDRFDQPLFLFENEFAINWFNDKNPDIELTSLL

SEQ ID NO: 1067 - protein, 284 aa, Listeria monocytogenes
MISRNLKIYFRDRTAVFMSLLTVLIIIGLYAIFLGNNMEEMFKQASGKTVGIQELVNTWVIAGILSITPVTVSLAVFSLKVHDEELSIARSFAITSASRWRIVISYIVSGLVASFLLSVITLFVGEMYIWLTGGEFLPFESWIRLIGIILINVLCCSSIMFFIASLVKKASAFSSVSTIVGTVIGFIAGIYLPIGSLPAAVQTAMKCFPFTYGASTIREIMTKEPLKEVFAGNTGAMDATKEMIGITIYWGDKTVTTGLSLLILSAFAVVFGVLSVILMKRQTK

SEQ ID NO: 1068 - protein, 571 aa, Listeria monocytogenes
MIDKRLFQLVEKKSLVLLILFRVLSLGLMIGLWLVFAQQLTHYLEGQNVDWLWLIGTVLVVLVGKAILTKLAEKQIYQASAELRLSMRRAVMEKAFRLGNNEGQLPASTLTQLAVDGIEQLEIYYSRFLPQLFYCLIASLMIFGSLVGFAWQPAIVLLICMPMIPIVIMAVMKIAKRILSGYWSDYTNLGTKFHENLSGLSILKAYDQDKYKQEEIVSDAERFRKATMSLLSMQLNSITIMDIISYSGAALGIGMSLIMFTNGTISMTGMLMFLLLSAEFFIPMRQLGSLFHVAMNGISACSKLFAYLELKEQVYGSVELAKPLEKIEVHHLTYTYEGGKAKALQDVSVHFNKGSFSALVGKSGSGKSTFVRVLLNQLPGYQGEIVWNDVPLASLSGEAIRKQAVLVDNHGYLYANSIRENLLIGNPAANDSDLWNVLEQVSLADFVRKLPEQLNENLEEDGSNLSGGQRQRLLLARALLRQAEVYVFDEITSGVDLESEKIILLVLQELAKEKIVLFISHRLYNVLGADQVLVFDAGKLLEVASPERLQQESNYFKNYFLEEEALLKGGA

SEQ ID NO: 1069 - protein, 303 aa, Listeria monocytogenes
MIKLTNVVKKFGKIEAVKGINLEVEKGSLFAFLGENGAGKSTTLSMICTESEPTSGEIYIDDEKLTFKNRKLFRQKLGVVFQENVLDDLLTVRENLYNRASLYGKTKAEITERLALVSSIMGIEDILNRRFEKLSGGQKRRAEIARAIMHDPEILLLDEPTTGLDPKTRVSVWKIIDYLREELGMTVFLTTHYLEEAKDADQLAVIHKGKIIAQGTPTNIRSRFSVDKIFFYDAKVAELQKIMKKANLPFKVSKATMRVDVITQDVEILAILNQAAGLYGSFEVIKGNLDDAFISMIKEESDD

SEQ ID NO: 1070 - protein, 142 aa, Listeria monocytogenes
MSTKLIQFIQSACIIFSASIITMICSYIATGESETVAIRDIFIMLGFSIVTTFIQQLFFNNSVKTKLAFYSRLIAFFLFIGAAILGLGWLLDWYHNIAGFMIIFGFICVTFLVMHIFFSFRDVKFSNEINQKLAEMRERETK

SEQ ID NO: 1071 - protein, 151 aa, Listeria monocytogenes
MKFHVKQNNNLAVGEVDVYCHPDNLEEVTNIVMGIDEPTEKISVKKDGATYLLEPKAILYFEAVESKIFVYTEKEIYEIHWKLYELEEKFKDSSFFRCSKSMILNIEWIEKIAPGFHGKFEAKLFNREKVIISRQYAKVLKQKLNMGGKRK

SEQ ID NO: 1072 - protein, 159 aa, Listeria monocytogenes
MNVHDFSEKAMNGKEIALSDYKGKVLLIVNTASKCGLTPQLEGLEAMYKKLGGDNFEILGFPCNQFLRQDPGSDEEILEFCQMNYGVTFQMFSKIKVKGKDASPLYKYLTEQTGGKKVEWNFAKFLIDENGEVIERFPSKMKPEDFEDKVEALVAKVNN

SEQ ID NO: 1073 - protein, 350 aa, Listeria monocytogenes
LSYEPNTKETMQKIKELTSIPSPTGNTGKIIEKLAKDLDASKIPYRLNNKGGLIVTLPGKDETKHRMLTAHVDTLGAMVKEIKADGRLLLTLIGGYRFNAIEGEYCTIETSAGDLYSGTILMHQTSVHVYKDAGTAERNDKNMEVRLDVKALDADKVRALGIEVGDFVSFDPRVQIINDEYIKSRHLDDKASVAILLQLINHIHENNLELPHTTHFLISNNEEIGYGGNSNIPAETVEYLAVDMGALGDGQTSDEYTVSICAKDGSGPYHLGLRKHLVELAKKNNIDYKVDIYPFYASDASAAINAGNDIIHGLIGPGIDASHAYERTHRDSLYHTEKLVYAYLFSNILK

SEQ ID NO: 1074 - protein, 491 aa, Listeria monocytogenes
LEQTKVKAVTIAVFVATFMAAIEGTIVSTAMPTIVSQLDGIELMNWIFSVYLLTSAVTVPIYGKLSDLYGRKNIFVIATIIFIIGSSLCGFAQNMEQLIIFRAIQGIGAGGILPSTMTIIADVYPFEKRAKVLGFMGSAWGIAGVFGPLVGGFLVDQLSWHWIFFINVPIGILTILLILLYLREKVEHVKLPIDYLGASLFTVALLGLLFALQRAGESLNWTEPLVVILFAVSIVLFIAFYFVEKRAKDPIMPFVLFKNPVVLIGNLIGFLISAFLIGINVYIPMWAQGMLGHGATIAGFMLAPLSVTWIIGSFIGGKLLMTLGNRHTVGIGVLITAASGLILALFPASTNDIFFYLNSAFMGFGFGIIFTTTTVTVQDAVPRFQTGIATASNTLFRTVGQTIGVAVFGTIFNSVLTSEFRAAAGSEVNRSNLNQLISPQTSGNVSTDLVDPLRDILYSGLHTVFWVMFACCIVSYFIHFILPKKHISGEK

SEQ ID NO: 1075 - protein, 250 aa, Listeria monocytogenes
MKAVRDTSILFGRSMRHIMRSPDTIITVAIIPIMIMLMFVYVLGGAIQTGTDNYVDYLLPGIILMAIASGIAYTAVRLFTDVQKGLFQRFHSMPISRSSVLWGHVLTSLVSNAISIVLIILVALLIGFRSSAGIVEWLAVAGILLLFTLALTWVAVIPGLTAKSVDGASAFSYPLIFLPFISSAFVPTDTMPTAIRVFAENQPVTAIVNTIRALLYSEPIGNDIWIALAWCVGITVVAYVFAVTIYKKMV

SEQ ID NO: 1076 - protein, 239 aa, Listeria monocytogenes
MLTLSTGEIAQLFQISKYKIRHYIDEGILVPKRNPENGYYYFEEADIYRLYQIILFRKIGFSIQEIKESLLGEKVTPMLEQAEQDLQQKIEELVEIQKTIQKIIHSQKEMRLNEITFVAKDDRYFKKVPNQIIDHNTINYSQAAKHNLPDLEEPFYIFSKQDTGVICLKSIKKRSDYTFPAGEYACKSFIAKDEATIETQIQLFLEELKYPTTSMILYENIYPSLAYPDAMVYTMEVPL

SEQ ID NO: 1077 - protein, 254 aa, Listeria monocytogenes
MKEVMIKATGLEKSFKKTEVLKGVDFEVKHGEIFALLGSNGAGKTTTIQILATLLKADNGNAHISGFDVKTEPEKVRKHISLTGQFAAVDGLLTGRENILLIAKLRGEKNPAQTADDLLARFGLEKAADRRADTYSGGMTRRLDIAMSLVGSPDVIFLDEPTTGLDPEGRMEVWKTIKTLSDGGTTILLTTQYLDEAEQLADRIAILHGGTIIANGTLDELKKLFPPAEVEYIEKQPSLEEIFLAIINGKEEVK

SEQ ID NO: 1078 - protein, 339 aa, Listeria monocytogenes
MSKDIDWSNLGFSYIKTDKRYISYWKDGEWDEGALTEDNTLHISEGSTALHYGQQCFEGLKAYRCKDGSINLFRPDRNAARIQKSCERLLMPHIPTEKFIDAVMQVVRANEEFVPPYGTGATLYLRPFVIGVGDNIGVHAAPEYIFSVFCSPVGPYFKGGMAPTNFIVSDFDRAAPNGTGAAKVGGNYAASLLPGQAAKERNFGDCIYLDPATHTKIEEVGSANFFGITKDDKFVTPYSPSILPSITKYSLLYLAEHRLGLEAVEGDVYIDKLDEFKEAGACGTAAVITPIGGIQTKDDFHVFHSETEVGPVTKRLFDELCGIQFGDVEAPEGWIYKVK

SEQ ID NO: 1079 - protein, 249 aa, Listeria monocytogenes
MTANKMLDEKFYSKSLGEELDLIICLPPDFSPLYKYPLFIVQDGKDYFQFGKLARHSEELALNEQIQKAIFIGIPYKTVMDRREKYHPDGKQNDAYIKFLAFELVPYLEERFPSFQMPTSRFLMGDSLGASVSLKAALLFPFTFGNVILHSPYVDDTILTLAEKVDPSKVKIFHIIGDQETAVETTGNEVLDFLSPNKSLEQILTTRGFDYYFHVFNGDHRWKYWQPFIKDSLQYMLPVNTFDLESMRA

SEQ ID NO: 1080 - protein, 147 aa, Listeria monocytogenes
LTVKKVTDDIGKQAALKIRNDVFVVEQRVDPALEWDEFDEIDSVVMFVDYAEDGTPLATGRFREKDGYGKVERICTQKVARGTGSGRRIMEAIESEAKSRGLTTLKLGAQVTAIPFYEKLGYETCSGLFLDAGIEHKDMKKTLTYEI

SEQ ID NO: 1081 - protein, 224 aa, Listeria monocytogenes
MINQKKIAGEKACEWIKDGMVVGLGTGSTVYYTIEKLGEMVNNGLHITGVATSEETNKQAQNLGIPLKSLNDVTEIDITIDGADEIDTDFQGIKGGGGALLREKMVASASLKNIWVVSEEKLVRNLGKFPLPLEVIPFGWKQVERKLEKEHIQTNLRKQSSGEVYVTNNGNYILDIVNQTFTDAEMWQEKLAQIPGIVEHGLFLHYVDIIICAKANGEIELIKK

SEQ ID NO: 1082 - protein, 210 aa, Listeria monocytogenes
MNVTSYNWKEEVANAITHGIGFILSIPALVLLIIFAAGKDNPLYLTSFLIYGISLMLLYICSTLLHSFKPCKARTIFNIMDHAAIYVLIAGSYTPFVLITIQGTLGWTLFGVIWGLAIAGIIYKIFMTGKLKLLSTSVYLLMGWMVMFAIKPLYAGLTPTGFWLLATGGIMFTVGAVFYSIPRVPYMHAIWHLFVIAGTAFMYFCILFYV

SEQ ID NO: 1083 - protein, 205 aa, Listeria monocytogenes
VIPIELSPRQHQIVAYVRANEPATGDSIAAHLKLTRATIRADLSILTMTGILDARPKVGYFYSGLETNPIHFDEIRQLKVADIMTQPFFAKKETSVYDAIVMLFMEDIGSLYVINEELLVGLVSRKDLLKGALADADTKATPIATIMTRMPNLVTVTKNDTVLHAAEQLVFHQIDSLPVLENAKVVGKISKTRITALFVDTIKKV

SEQ ID NO: 1084 - protein, 270 aa, Listeria monocytogenes
MENPVIIYVISDAIGETAQHIIRAVTAQFSLNKPADIRRHAFIRDESALLETLEEAKATDGIVVQTLVQAKLAEYATNFCVQNNIPNVDLLHTLTAAVEAKTGLKSKQDPGNMRRLDSNYFDRIAAIEFAVKYDDCKDPRGLLDADIVLVGVSRTSKTPLSSFLANQNWKVANVPLVPEIPIPAELFQIPAERIIGLTTTPEKLAQIRKVRLRSIGLDEASSYSSEKRILEELEYGYDTFKKLGCQVIHVEDKAIEETAALITEIITSYH

SEQ ID NO: 1085 - protein, 204 aa, Listeria monocytogenes
MTLSIKSIDSFEKDSIVEEVASLVFAGFKSKFTKTLFKETEAHDITYAFCHYIYTEKGENLLIAIQDELVCGCLFVTSKSDSYQKLYQTLRKFLSFSQCLKLIFLLSLLSHKPVQNERYIDFITVSPNFRGQGIGKTLISHCLETFHDEKITLYVAKKNSGAYKLYRNLGFQVIQKENSTLMGVLTGIKEWRKMEWIQLNVGKK

SEQ ID NO: 1086 - protein, 879 aa, Listeria monocytogenes
VRKFVYQFSEGSKEMKNLLGGKGANLAEMTNIGLPVPPGFIISTDACNDYTANNKHLSEAIFDEVKIHLAELEKQTGKIFGFAENPLLVSVRSGAPFSMPGMMDTVLNLGLNDQAAEGLANLTGDARSAYDSYRRFIQMFGDVVFEIPSYHFEQALSRIKKANDYRLDTELTATDLSELIDAYKLIFSQATGTDFPQDPLEQLRLAIIAVFDSWMNPRAVIYRRLHDIDASFGTAVNIQAMVFGNTGETSGTGITFTRNPSTGEKKVFGEFLLNAQGEDVVAGIRTPEPISALEERMPTVYKELLHTCELLENHYLDMQDIEFTIEKGKLYVLQTRSGKRTAKAAIQTAVDFVQEGKITRQEAIMRVETKQLHQLLHPTFDESALKNGQVIATGLPASPGAATGQIFFAAKEAVQATERGIPVILVRNETSPEDIEGMARSNAILTAHGGMTSHAAVVARGMGKCCIAGCAELTINEKEKTIILPTGDTLHEGDALSLDGSSGKVYLGEIALREAQIGGHFDELMAWADTEKRLMIRVNADTPPDFKKALLFGAEGIGLCRTEHMFFDEKRIHYVRQMILAESLSERESVLTTLKEMQKADFSELFRIADGRAVNIRLLDPPLHEFLPKTKQEIEQLASAMNRTVPQITKRINELSEANPMLGHRGCRLAITFPEIYRMQTEAIIESAVTLHDEGIDVHPEIMIPLIATKSELSYIKKEMKHAIHTIFDRERVMLPYDIGTMIEIPRACVTADEIAEEAEFFSFGTNDLTQLTYGFSRDDATKFLADYYEKDILSKDPFVSIDKNGVGALVEMAVTRGRMTSEHLKMGVCGEHGGDPESIQFFHQLGLTYVSCSPYRVPIARLAAAQAALAEKHLIPTI

SEQ ID NO: 1087 - protein, 125 aa, Listeria monocytogenes
MIEKIGQVMLYVENQAAVRDFWVEKLDFVVVSEEVVNGEIQWIEIAPTKGVETTFVLQNKKKVAEMNPEMNLGTPSILLFGSNVAELYEEYKNKGITVGDLVDLPMGRVFNFSDNEGNYFAICEK

SEQ ID NO: 1088 - protein, 327 aa, Listeria monocytogenes
MRIGMRTVKTAIAATLAIILAEWLHLEYAVSAGIIAILSVQNTKKGSLQLAIQRVYSTVLALSIAAVFFMLIGYNAVSFGLYLLIFIPLAVRLHVADGIVVSSVLVSHILLEQSLSFFWFKNELLLMAVGAGIAIILNLYMPKMEDELKRSQQKIEAIMRQILTEMTQGLRNQSEYHDEFGLLNQLKGTLDYAQEKAARNLDNQFFASSHYYSQYVDMRLVQYRILTQMKRHLVAFDHSSEQSMALAEITEKTAQTLDEHNTAEDLVAEITKMVHEFRSSKLPETRAEFENRAILFQFMNDLRYLLEMKRDFYAEFGLKEKEMTRGR

SEQ ID NO: 1089 - protein, 207 aa, Listeria monocytogenes
LETWITSIMADFGYIGIFVLIMVENLFPPIPSEIILTFGGFMTTVTSLNVVMVIIVATLGSVVGAILLYKVASYFGKERLTKIVLKYGRILRLKESDIERAENFFLKYGSWAVFLCRMIPLIRSLISIPAGMTKMKMSKFLILTTAGSLLWNTVLIGLGAMLGESWSEIVVFMDSFSTIIYSIIAILVVVGLGFFFRARFKKTLDEE

SEQ ID NO: 1090 - protein, 503 aa, Listeria monocytogenes
MNQSETKALEALQNGSDIRGIAIATEKYQITLTDERVEKIAYGFAKWLKEEKKVEGQAKVAIGHDSRLSAERLKAALVKGLTFAGIDVVDVGLATTPAMFMATQYEDYDCDAGIMITASHLPFMYNGLKLFTKSGGAEHEDIDYIVAHADKSFIENGLNLGKVTKQDLLSTYAADLTDKIRAGITDAADKMKPLQGSHIIVDAGNGAGGFFAEKVLAELGADISESQFLDPDGNFPNHIPNPDNEEAMASLKKAVLASGADLGVIFDTDVDRAAIMDKNGESLNRNPLIAVISSIILEEKPGTTIVTDSTTSGHLQAFIEAKGGKQHRFKRGYRNVINEALRLNANGTPSEIAIEVSGHAALKENYFLDDGAYLIAKILMTYATLRKNGQDLPDLIADLKEPAESEEIRLSITANDFKAYGKEALADFLTFVEADPDMELEPVNQEGIRVNTKGALGEGWFLLRMSLHEPVMPMNLESDEAGGIRKVKDRLAGFFATKADLKM

SEQ ID NO: 1091 - protein, 291 aa, Listeria monocytogenes
LLSKMEINKRALKENMALLACPICGAAFEFREPQSFVCLEGHGFDIAKPGYVHLLKQAHKTKYDQALFESRKKVIASGFFEKLIERVTEIITEKKKEQLVLYDAGCGEGSHLARVVSNLQATGVNVKAVGLDIAKEGVKQAARDYPGTSWTVADLANCPNQAETADVILNILSPSNYVEFKRLLKKDGFLLKVVPEANYLRELREFIYVDEKSSYSNESVTSRLAEKLSVEHVERVTYKAPIAKELFADFLEMTPLGWHIEADKKNELLENPPEELTVDLQIIIANRAHLL

SEQ ID NO: 1092 - protein, 335 aa, Listeria monocytogenes
VDTIKRWKKITIIMSAIIVILVAILFIGNNYEMNETRVAIPTTGGKLSAVVTTPKHGKPKGIIVFVHGDGAQEATQNGGYKPLMERFAKQGYISVSWDKLGVGKSSGNWLNQSMDDRANEVNQVIEWMKVKYPDSTAKIGLWGASQAGWVVPKAMNANNEIDFSILAAPAINWMRQGEYNTCWQAKDTGKTTKEVKQAQQNFLTDSALISKNKTYESYKQNGGKEEMTPGRYNFIRKNMNQDATLDLSKVKTKIYLALAEKDKNVDSAETKDVYTQQIKKENLETQTIPNVSHQMINPAIANSELLTNIVGLMVPKYFLVDNAYLDYCEQVVSKQ

SEQ ID NO: 1093 - protein, 160 aa, Listeria monocytogenes
MIIFVWAQDRAGNIGKDNKMPWHLPGDLQFFKKTTTGKTLVMGRKTYESLGKALPNRKTIVLTRDQGLKLDDAEILHSKEAVLALAETGEPIYIVGGAEIYRLFMDVADQLIVTKIDAEFEADTAFPEVDWENFSEVAKEFHEKDEKNKYNYTFYTYERN

SEQ ID NO: 1094 - protein, 314 aa, Listeria monocytogenes
MKQYLDLEKYVLENGTQKGDRTGTGTISTFGYQMRFDLQEGFPIMTTKRVPFKLVVSELLWFLHGDTNIRYLLQHNNNIWNEWAFERFVKSDDYKGEDMTDFGLRAERDPAFKEVYQAEMEKFKTRIIEDEAFATKYGELGNIYGKQWREWKTSQGETIDQLADLIEMIKTNPNSRRLIVSAWNPEDIPNMALPPCHSLFQFYVADGKLSCQLYQRSADIFLGVPFNIASYALLTHLIAREVGLDVGEFIHTMGDAHLYNNHIEQVKEQLSRTPHALPKLVLSDKPATIFDFEVADISLDGYNPDPSIKAPISV

SEQ ID NO: 1095 - protein, 630 aa, Listeria monocytogenes
MKQLKVENLTKTYGEKSLFENISLTITEGERIGLIGVNGTGKSTLLQIISGSESGDKGTVTKAKDYTIGYLAQDPAFNEEDTVLAAVFDGDTAALRAMRKYEEVLLAMSLDAENTKLHDAYTAASQEMDASAAWDMNTEAKTILERLGITDLTAKISALSGGQRKRVGLAQVLIETPDLLILDEPTNHLDFQSIRWLEEYLNRFKGAVLLVTHDRYFLDRVTNHMVELDRGSAYRYVGNYEKFMESKAIRMENEVRESEKNKNLYRKELAWMRRGPQGRATKQNARQDRFHDLEKKVKIKTDDSELAIDFVTSRLGKDVFELKNLEKRFDEKQVLQDFSLIIQPGERLGITGNNGTGKSTLLNMLAGKLAPDAGEVVTGQTVQIGYYTQQNEEMDPDMRMIAYLQEAGEQVTTSGGEVISVSAMLERFLFPPNSHGKKIGSLSGGEKRRLFLLRILMERPNVLLLDEPTNDLDTQTLTVLEDYLESFNGTVITVSHDRYFLDKVVNKLLVFRAIGEVEIFYGEYSDYLKELEAKGKPAKSMKKMANTSVEKSSPEKKEKVKLTYQEQLEWDGIEDAISKLEKDIESLNETLEQTGADFTKAAEISGFITAKETELEQMMERWEFLSQYAE

SEQ ID NO: 1096 - protein, 170 aa, Listeria monocytogenes
RGSSEIRSAMRRTRDSFLPDRSLGKGGDGGLELADKVIAAVESGAADYKRIYDDAWSMEEKLEAIVTKVYGGIGVELSSKAQKQIVEFKKYGWDRYPICMAKTQYSLSDDPTLLGRPTDFVIHIREFIPKLGAGFVVALTGDVMTMPGLPKKPAALNMDVDENGNAQGLF

SEQ ID NO: 1097 - protein, 426 aa, Listeria monocytogenes
MSNKVKSDIEIASKAEILPVTTIAEHLGLDADALELYGKYKAKLSYDTIHSLKDKEPGKLVLVTAINPTPAGEGKSTVTVGLGDALSKKDKKTVIALREPSLGPTMGIKGGATGGGYAQVIPMEDINLHFTGDFHAITAANNALSAFIDNHMQQGNDLEIDGRRIVWKRVVDLNDRALRKVVVGLGGPIQGVPREDGFDITVASEIMAIICLASDLKDLKKRLSEIVIGYNYKKEPITVGEMGYEGALTLLLKDALKPNLVQTLEHTPAIVHGGPFANIAHGCNSVSATSTALRLGDYVVTEAGFGADLGAEKFLDIKVPALGKAPDCVVIVATIRALKMHGGALKTELSEENVDALAKGFTNLQKHTESIQTFGIPYVVAINKFITDSDAEVAKLEALCEEHGIPFSLTEVWEKVAMAAWNSRIK

SEQ ID NO: 1098 - protein, 142 aa, Listeria monocytogenes
MPTPSMEDYIEKIYSLIETKGYARVSDIADELFVHPSSVTKMVQKLDKDEYLIYEKYRGLILTPKGTQMGKRLLERHALLESFLSIIGVDPSHIYHDVEGIEHHLSWNSIDRIGDVVQFFENHPDALKTLKAMETTKPETKE

SEQ ID NO: 1099 - protein, 151 aa, Listeria monocytogenes
MEYEQLLQNELGELEIIQEELQNKEYRGMIVKTAKDGTTIRTRLAKKTDKKAGYFVAFWEKDEFGKNCPFDENDCADFLCIVVIDGDLNGLFVFPRQCLIDKGILTSEASIGKMAARFYPTWCQDLNKTAKKTQAWQQVYFKNYSIRKEDH

SEQ ID NO: 1100 - protein, 551 aa, Listeria monocytogenes
MHFLKKTLPIFAILTVLLLTACGNDNEKSTTKTSPDKIKFLETSELLTLNTTAEEDFASFTAQNQVFEGLYTLDQKDNFVPGVADGMPEISTDQTKYTIKLKKNAKWSDGSQVTADDFVYAWRRAVDPKTAPGYSALFKDSIKNATEINEGKLPVTDLGVVATDPTTLEITLKKPVPYFISLLSFETFFPQKESYVKKQGDKYGTDSAHTLYNGPFVMKDWGGNITNKWTYAKNDQYWDKDNVKVNEIDVQVAKDINAGVNLYNTNEADRVPLSGDFAKQYKDKKDFQTEKDALISYLRMNQKRDGKATPLANNSLRHALNLAVDKKQLTDRILGDGSFPANGLLPKDFVQNPTTGADFRTDSGNHLVYNKEEALKYWKQAQKELGTDKVTIELLGDDQETTKTIFAYLKAQFEDNLPGVTIKVKNMPSKSATQLTSDGNYDLSLAAWMPDFKDPWTYSSLFLSDYFNNHMSYNSPAYDKLVKSTDTTLATKPEERWNAFVASEKVLLDDDAAILPLYQHQTAVLQRTDITGVQKHAFGSPYSYKFIRVEK

SEQ ID NO: 1101 - protein, 135 aa, Listeria monocytogenes
LDQKIKDIYHIDDSFSIDNEKYNKWLKSLLNKTRGEITENDVYTMLLQQELEDLAIEKAIEFIKIDPLAGEMWDGQFLEQLAGISVDKLVAYKEELQKLIPYMDNQINEILWDFETEKEEFLFRYAKFKDKVANL

SEQ ID NO: 1102 - protein, 121 aa, Listeria monocytogenes
MNNIDSIMSKYNKQQVSKIKDFLLSEIDSDNIEETIDFVKSNNQEKMGKFQDILYDGGIYSGLFIEGNQYLISSSNRKVLIIDAVSEENGVDKELTRIECSLEDFTFLLRNIKDVLRYEEF

SEQ ID NO: 1103 - protein, 205 aa, Listeria monocytogenes
MWVLMKNGIVDVEATNAYNAAVLGGKMPHESNEAQEEAELLQAVVQSVKEGTDPVTGQEISKAQGFSIISGVIFYYAGGGYKGKKIKIPKKWLDRRRNVNRIDFLQSVNIKDFVVKDKHLRNSTAKRARKFDAETSEEANLIVQDALKNGKVKKIEDNGLGSQRQKSYSAIIDTEKNVGTKGESHIKIVYDELNNVWTVYPVPAP

SEQ ID NO: 1104 - protein, 116 aa, Listeria monocytogenes
MLKNYYTGFEGYPEIDFYTYINGEKTGIEMWEGYFDNIMNEFSPVDGRWVSLAYYYHLYEGWYDESPWVIPDNKKALEQFGTIDIKVLDNVTQEIMMKLIKLLKDNLDSEIFIEYS

SEQ ID NO: 1105 - protein, 145 aa, Listeria monocytogenes
LKIKKILPQTIKSEVYFIDEIKNFDIVTEKMNDNFYTYRLGSNVMMWLNDEGVIGEIECIFPAQIDNLITLWEEKNTVVQNGFPMIDTDIVENKTFIPKVRIFNHGDYFILYFSNMYKYNKEIISENLTFYAKDTELIAIKAELT

SEQ ID NO: 1106 - protein, 147 aa, Listeria monocytogenes
MEEQEIIEKVEILPNNFSENDSIYISQENIKNLVLFSKENQTVLELLITPFLICVNSGLKYELHYYEISTEISKNDTEIIGFPFGNKLPKEITDNISPKLFVRREDYSAFENFLSQYFNAMKSMGFADDKQAIGMIEHGATLFYEVL

SEQ ID NO: 1107 - protein, 58 aa, Listeria monocytogenes
MKYLENCDADNLYWISEIFEDISANLKSQKFIDYLRKLDKKFPELEMTQDIDIAESYF

SEQ ID NO: 1108 - protein, 695 aa, Listeria monocytogenes
MAREFSLEKTRNIGIMAHIDAGKTTTTERILFYTGRIHKIGETHEGASQMDWMEQEQERGITITSAATTAQWKGYRVNIIDTPGHVDFTVEVERSLRVLDGAVAVLDAQSGVEPQTETVWRQATTYGVPRVVFVNKMDKIGADFLYSVGTLHERLAANAHPIQLPIGAEDTFEGIIDLIEMNALYYEDDLGNDPHIKEIPADLKDLADEYRGKLVEAVAELDEELMMKYLEGEEITKEELKAGIRKGTLNVEFYPVVCGTAFKNKGVQPMLDAVLDYLPAPTDVPAINGVLPDGEEAARHADDSEPFSSLAFKVMTDPYVGRLTFFRVYSGTLNSGSYVQNSTKGKRERVGRILQMHANHREEISIVYAGDIAAAVGLKDTTTGDTLCDEKEQIILESMEFPEPVIQVAIEPKSKADQDKMGQALAKLAEEDPTFRAETDQETGQTLISGMGELHLDILVDRMRREFRVEANVGDPQVSYRETFRKSAQVEGKFVRQSGGRGQYGHVWIEFGPNEEGKGFEFENAIVGGVVPREYIPAVQAGLEGALDNGVLAGYPLIDIKAKLYDGSYHDVDSNEMAFKVAASMALRNAAKKCDPVILEPMMAVEVVIPEEYLGDIMGNITSRRGRVDGMEARGNAQVVRAFVPLANMFGYATHLRSGTQGRGVYTMQFDHYEEVPKSIAEEIIKANGGNNKED

SEQ ID NO: 1109 - protein, 150 aa, Listeria monocytogenes
MILINKRAENQDYQMILAIWEKSVIATHDFLAAEDRQFYKEQIPLFLDNVELFLWFAGEEIVGFSGTSERELDMLFLNPIATGNGYGSQILIWLIENKRINLVDVNEQNENATRFYLKHGFVVSSRSDLDGFGNPYPILHLQLKERVNGI

SEQ ID NO: 1110 - protein, 118 aa, Listeria monocytogenes
MINSRFYEGFEGEAELSFVAGDNKLLIWNGYFETILDNLLDCNVEREGVLKEYFNHEGWYDDSPWMIEDNSLTIIQLKCFDINKINQTSMKDDLEEVVKTIISFLENNRFSKIYIEYE

SEQ ID NO: 1111 - protein, 462 aa, Listeria monocytogenes
MPTKNHRLPKKHLPIRKSTTRFTKGVVTVSRIDIGEIQTFAYQLHTANEAARKSIKDIKNAVKNYTEDGSLKGKAIDASKNYYQMTYFPLCDAIIEAMNESEERLAQYIADFHAQVDSSADARIDADGLYELGKMIDRIEAKKEALAQRMNTGTEGQMQSYRSQLSIAYKQENILEKYLAFEQSHGGFFDNLTDLVRGIQQTIRELQSNIQFNSKTGTYDMSKLNFTTVTRMQNASGKALNDNAKTFNFDEYQKTYRGQMWVLMKNGIVDVEATNAYNAAVLGGEMPHESNEAQEEAELLQAVVQSVKEGTDPVTGQEISKAQGFGIISGLIFRYTAGGYKGKKFKIPRDWLHRRKKNNGVEVGTDFGKIGKLVNHPNIKINWSEYAEHGMSRLKQRGLSKSQVDDFVEHGKVLSQNEGEKFAFITEDGVAIVSKDGKLVTAWGKKDFDEGMKKIIGKLYGK

SEQ ID NO: 1112 - protein, 122 aa, Listeria monocytogenes
MDAKSQQAEAQLQLLKKEQSAAKDFLQDLQRQQNEQEWLAEDVARVHQEERESLELLREVWQGAESRSFGYYLADLQEEEKQKWHKKIQANEEECQQKITACRKNIYQLENQQQDLQKELLQ

SEQ ID NO: 1113 - protein, 94 aa, Listeria monocytogenes
MSEIKVKEATLAKYATKLESKGKSTEYLPMKGGNMSYSQANSINHFRTALFDLVDAVDNFQGVVGTDAKRLKELGASFTRKDQELERSMGLGGK

SEQ ID NO: 1114 - protein, 297 aa, Listeria monocytogenes
MRLDFSKKTMQDFERDAEVVHATRERSFWRFMLADRRAVFATSVLILITVACIFAFLSPYDPNALSVQDKLMPPNSSHWFGTDDHGRDYLTRVLYGGRVSLLVGVFAMMIAVVVGTLAGTVSGYFGGFIDNIVMRFLDIFMSIPSFFLLMILNAYLKPGISNIIIIIGLLSWMEVARIVRAETLTLKEREFILYSKSSGGGFFHIMFKHIIPNAMPSIVVAASLNVATAILTESALSFLGLGVQQPNASWGSMLNNAQGYVGEATYLALFPGLLILMTILSFNVLGDVLRKGLSRRY

SEQ ID NO: 1115 - protein, 316 aa, Listeria monocytogenes
MLKTIIKRVLQIIPMLFIISIISFALIKLAPGDPVNSFVTPDMNPDDVERIRQSLGLDQPIYVQYFIWLGNLLQGNLGYSIVNSQPVLQQILERIPATLGLVGTSLVLTLLLSIPLGLVAANYENTWIDKVLNGISYIGISIPIFWFGMILIDVFSIQLGWLPSLGMRTIGVDSFWDMAEHAILPVITLTFQGCAAYYRYVRSNTINQLKEEYVLFGYAKGLSKVQIMGHHVLKNSLLPVITLLGMSLPQVITGAFITESIFSWPGMGSLGINAIFQLDYPVIMAITLFSALLLIIGNLLADLAYMIVDPRIREMG

SEQ ID NO: 1116 - protein, 177 aa, Listeria monocytogenes
MLIPSYLKSTAKELSINDFLNVEIVTINKEETFEILYCGTLKEIEGDQLITGEAYEIPLKIIAKSTLSGKEILLYDGAYYGYDSMFCDEFEEEATQNRELKKYPINNLSNIRLSIGIGIDYESEKEEYEFDENGHVVLIDDRHIPWEQVKTDGFDFLEITATDENGDSLLILTEELA

SEQ ID NO: 1117 - protein, 524 aa, Listeria monocytogenes
MKKFLLVAVISVFALVLTACGGSGASSDKANGSGKAKDGGSLIIGVTGDPEVINPNYASDRVTLTIQQAVYAPLFWEVDGKPALAKSLDISDDNLTYTVKLKDGLTWHDGKPLTADDVVFTVNSILDTKQNSPNRGNFVFDDKPVKVEAVDDTTVKFTLPTVAPAFENTIKTFFPIPKHIFEGVENIEKSDKNKNPIGSGPYKFVEYKTGEYVSLERFNDYFDGKPKLDKVTFRITKDQNAANLALQNGEINLKSIQPSDRNKVEKASAVNIITYPENRLSYATFNENQPALKSKELRQALSYALDREEIIDAAYGSDEYAKPASSFLTENTKYFTDKVETYDQDIAKAKKLVKESGFDTSQKLTVYYLNNSKSQESIALYLQQQYKEIGVTLDLKPTDPNALSNITLDRKNADYSIALNGYIMGNDPDAYKSLYLSDAPYNYSNYHNKDLDALWEKGAVTADDKERQEIYEKIQNTIADDAVIYPISYDNAVLALDSRYGGQKAATPQPVTMFRDLSKLYLTE

SEQ ID NO: 1118 - protein, 423 aa, Listeria monocytogenes
MNLIGLRIKNIRKEKQLTLKDVAQGIISVPYLANIENGIKVASLETLIHIARRLEIPEEVLLMSEDEENRALLKELDEIFELLVCSNPKEIESRLKKIDENVELQHESPAVELSFYCLQVAFYYKTWKFSRAEEVEAKYLKNAEKRVENAFPLQLLSYYYYGQAVKHSHATCNYQLAVEYWEKCVALTDNKNFLTVFHVCICINYICQSIYEPALGHIQQAWDLIKDEEQERFVSILYFYGYIYFQIGFIGEAKYRFKQAQKYFSKYPEAKKIYYFVVQLKMAEIENIEGNETLFYEKITCLYKEIMAYKTTNISFNNNDYLVITELMVIFAEKGFVEEATSLMGLMNKVVERVQELNYFMEYTEILLLYQQDEQVSYEKKMIKLLKKIDASNDPVLIERVKKHASKHFAKSTKYKMAYDILS

SEQ ID NO: 1119 - protein, 443 aa, Listeria monocytogenes
MAKNMEILETDSVKKIYFRYLIPSLVGMLLMSLNIVIDGIFVGHKLGGVALAGINIAVPVFTIFTAISIWIGIGAATQFSFAIGEKNVAKAQTIFTNAILAVVSITVIIGIIAFIFKVPLAYFLGANDDTIGYVLEYMNILLVFGFALTLENILSIFVRNDGDPNLSMIALIVTAISNVILNYLFLFVFEWGVTGSALATMIAIIIGVLILTTHFFKKSSRLKFVKVDWNKAFFKKTLAIGLPSFLAEVGVSVFTLGYNISIAAIAGTAGVAAFSVLNYTHSVILMLFLGMGSAIQPLISYYRGAKARQKELETLKIAIVVAFSTGVGFLLVGFFGSNLLVSMFGNFSVEIRELASNGIKLFYTAYLFMGFNFVMMTYFQTSDKVKMATWITISREIIFMVIFLLVLPPIIGIPGVWLAIPISEMIVAASIVFYMKKKHILFK

SEQ ID NO: 1120 - protein, 196 aa, Listeria monocytogenes
MRKEEIKQAALTLFANNGFEGTSLADIAGVVGLKKQSIYSHFKDKDDLFLSIMKDAKSTEIDYYRAKLRDSDLSRPDLVLSSLLFGVKELYDTDEAYQFWLRYGFYPPKHLYEVVQADITENVLQMEHEFTDLFSNWMEQKLIPMQDVETMKEAYMGILDAVIVDIVYVNDPERTEKKITALWQIFWRGITLKALN

SEQ ID NO: 1121 - protein, 347 aa, Listeria monocytogenes
VKNTIKWIAIGFAGIILLPLLIVFFIYKKAVGKKDYNPEVLENLDKASQEFVKNTSPLSDVDSRYKYMRLATKALPSAKDIEIGDVENKKIDGPAGKIPIRIYTPQEDGPFEIIVYYHGGGFVLGGLQTHDAIARKLVQTTGARVVTVDYRLAPENPFPAAVEDAYAALLWVQNHRTSLRAKSSDIIVAGDSVGGNLATVVTQIAKSKGKPNITAQILLYPATDIFSRDASVLYPSMDEFAEGYVLTKESLDKFFKLYIANASDRKYDPLVAPIRSKDLVGLPKTFIATAEFDPLRDQGEAYAKKLKDAGVEVFAKRFEKVPHGFMTTNSEATDETYELISEFLEEK

SEQ ID NO: 1122 - protein, 404 aa, Listeria monocytogenes
MAKEKIVLAYSGGLDTSVAIQWLVESGYEVIACCLDVGEGKNLDFIKEKAITVGASESYTIDAKEEFAEDFALIALQAHAYYEGKYPLISALSRPLIAKKLVEVARQEGASAIAHGCTGKGNDQVRFEVAIHALAPDLKVVSPVRDWKWSREEEINYAKEHDIPVPIDLDNPFSIDQNLWGRSNECGVLENPWTTPPEAAYDLTVSLEDAPDTADIVEITFDAGIPISLNGENMSLANLILTLNEIAGKHGVGRIDHIENRLVGIKSREVYECPAAVTLITAHKELEDLTFVREVAHFKPIIEQKISETIYNGLWFSPLTEALVAFLKSTQKFVNGTIRVKLFKGHAIVEGRKSPNSLYDENLATYTSSDTFDQDAAVGFIKLWGLPTKVNAEVNSKVTITTEV

SEQ ID NO: 1123 - protein, 456 aa, Listeria monocytogenes
MEKLWGGRFQGKSEAWIDDFGASISFDQKMAKEDLAGSLAHVAMLGKCGIIPASEAAEITAGLKILQEKLAFGELEFSTVNEDIHLNIEKLLHEEIGSVAGKLHTARSRNDQVATDMHLYLKQAVAEIIQSLKHLRVVLVQKAELHVETIMPGYTHLQHAQPLSFAHHLLAYFGMFTRDLERLEESVKRIDISPLGSAALAGTTFPIDRAYSAELLGFSAVYENSLDGVSDRDFIIEFLSNSSILMMHLSRFCEELILWTSHEFQFVELTDAFSTGSSIMPQKKNPDMAELIRGKTGRVYGNLFGMLTVLKGLPLAYNKDLQEDKEGMFDTLETVQTSLDIFAGMIETMKVNTEIMEESTQKDFSNATELADYLAKKGVPFREAHEIVGKLVLECTQNGIYLQDVALSHYQEINPLIEEDIYVVLSSKTAVQKRNSYGGTGFDQIKVALENAKKTL

SEQ ID NO: 1124 - protein, 145 aa, Listeria monocytogenes
MRYEADFINRFQPLIEEYKLNYKVISEEELALFGSNFALVFSIHFDEVSLNYVCRDKDNLLVSYDVWSYFLHVFDDKDRENLPKYNSVRERVDVSFLILARGLPRHWNNVLNGDDKWLEAYKQYKLAGVPKKVIGHLKDSLSLNI

SEQ ID NO: 1125 - protein, 507 aa, Listeria monocytogenes
LKKLTNVFWGSGFLVLLAVLFGAFLPEQFETFTNHIQKFLTSNFGWYYLIVVAIIIIFCLFLVLSPIGSIRLGKPGEEPGYSNKSWFAMLFSAGMGIGLVFWGAAEPLSHYAVQAPGGEVGTQAAMKDALRYSFFHWGISAWSIYAIVALALAYFKFRKNAPGLISATLYPILGKHAKGPIGQLIDIIAVFATVIGVATTLGLGAQQINGGLTYLFGVPNNFTVQFTIIVIVTILFMLSAMSGLDKGIQLLSNVNIYVAGVLLVLTLILGPTLFIMNNFTNSFGDYLQNIIQMSFQTAPDAPDARKWIDSWTIFYWAWWLSWSPFVGIFIARISRGRTIRQFLLGVIVLPALVSVFWFAVFGGSAIFVEQHGNSGLSSLATEQVLFGVFNEFPGGMMLSIVAMILIAVFFITSADSATFVLGMQTTGGSLNPPNSVKVTWGLLQAGIASVLLYAGGLTALQNASIIAAFPFSIVIILMIVSLFVSLTREQEKLGLYVRPKKSQRSQL

SEQ ID NO: 1126 - protein, 216 aa, Listeria monocytogenes
MLYQKEREDLAKIVKTMFDRFETNAAGGNVSVRMNSEHIIMTPTLMSQAKLCDLSPYEILVVDNNNEVVEGDGRVTREINLHRACYVENPNIGCVLHAHPKESMLFATLGMELPNLTEATQKIGQIPTLAFAPATSSELAEIVRKHVIELGDKAVPSASLLNKHGIVVLDTSLHKAYDMLERIEYNAYIAEKALVFDALGIKKLAHDRELNYNLEE

SEQ ID NO: 1127 - protein, 310 aa, Listeria monocytogenes
MIYTITLNPAIDRLLFIQGELEKRKTNRVKKTEFDCGGKGLHVSGVLSKFGIKNEALGIAGSDNLDKLYAILKEKHINHDFLVEAGTSTRECFVVLSDDTNGSTMIPEAGFTVSQTNKVNLLKQIAKKVKKEDMVVIAGSPPPHYTLSDFKELLRTVKATGAFLGCDNSGEYLNLAVEMGVDFIKPNEDEVIAILDEKTNSLEENVRKLAEKIPYLVVSLGAKGSICAHNGKLYQVIPPKVQERNDTGAGDVFVGAFIAGLAMNMPITETLKVATGCSASKVMQQDSSSFDLEAAGKLKNQVSIIQLEER

SEQ ID NO: 1128 - protein, 449 aa, Listeria monocytogenes
MESLQSVIQFILNLGAAVFVPALMIIIGLIVRMKVRDAVSAGIILGVAFLGMNIVIGFMIEALTPAAQGLAERTGINLSILDGGWTSMATLAWAWPFAFLMFPLQLGINAIMLVINKTKTLNVDLWNVWGKILTAVLIIGVTQNVYLAFIVAGIQIVTELILCDANQRQIQELNGIPGVTVSHGMMIFCIFLMPLDWLLKKIPALRKDMDANALKDKIGIFAENHVMGFIIGGLLGVAAGYDVAKTLMLAMQAAAALTLFPMVAKLFMQALSPLSDGISEFMKRKFKNRELFIGLDWPILAGCSEVWVAIVLMVPVTLIFALILPGNGVLPFAGILNISLCAPALIVTGGNLIRMIILGTITTPIFLYVSTFFAGTITDLAHSTGAISLKAGQQITWSTLEYPVFRYIFAEASQFTILGFIFVAIWVVLLVFYVKMMKKRTIELEKASS

SEQ ID NO: 1129 - protein, 91 aa, Listeria monocytogenes
MKKVIVACGSGVATSQTVASKVERILKEKGVRATVEAVDIKSLEQHIKTSDVYVAITKANKEFDIPTLNGIAFLTGMGMDEETEKLLNALK

SEQ ID NO: 1130 - protein, 155 aa, Listeria monocytogenes
VDYHDLFQKELTLINSRYESQAELFEYTSKILEKEQYVEPTFREAVTSREVVFPTGLEMNGIKIAIPHTDTIYVKRPFVLVNKLSTPIPFVQMGTVDKWIDVEVIFMLGIKNPQDQVPLLSSIMEKFMEADFVEQIKEINDSNTLCDFLKKQFGE

SEQ ID NO: 1131 - protein, 157 aa, Listeria monocytogenes
MEFKHEVENNFANIIQEYRFNLIKVNEDEIMLLNPNYALTIWKSREGIDIYYLFLHSLEKVKITNFLFSNYEKDLLANITPANNLTDQISNSLLIHARGLSKYFPELLSGQNDWVKEFKENKFYNEPRAINKDEYSAYQTIIKNINGKKIEGFQNEI

SEQ ID NO: 1132 - protein, 668 aa, Listeria monocytogenes
MEQNCKELITYLLLNRQVNLRNVSKNFKVSKEAIGAQITQINHLLKSEPILIDHDMIFVTDVCREACYRLLTAEEQQLFSFYEVNIRRKLIMIKLLLHNHYMSLGALADYVYVSKNTMLTDVKSIKESLHEFEIQLDYSRKDGYAVSGSEFLIRNLLAELIREVVQTPYGKFVLDEKKLITVSEVFLLKKRLEKVESKLQITFTDEQMEELPYILHGIIKRSKVTNKKWTFKIEMYDIKNTREFPIMKEMFWGYDFLSENDLLYLSLQVLASNLVESALHFSDSEEIAYAVDEFIRLLEMYFATEIMKKNEFKEKVILHVRPAIYRTILGFQINNPLKKQFIKEYTPTFNIVEKASKPFEKLVGHKWSEEEIVYLSMIVLGWMYQIEETEQPIFRAVVLCKSGTSISKLLLENLKMMFPNIDFQGAYAVRQLNTVARDIDFIFTTVPVQSDATIFVIPSILSKDSRQILREQVDKAIEMDSHKKTKELLAMLKDEIPEENIRLVQAKVESFFNKKEQPVEKKEPEQMRITEEQVHFLEMPLEWEQLVSAAFAPMLERGTVDASYIHTCEEIFYQNYEQMMIGPNIYLPHAKPANGVIEQDIQLMIMKANTKTPEDEAVKIMIALAPSEQNKHIPLLLKLNEIFLKPEKLVGILASTNKKKIVEILERG

SEQ ID NO: 1133 - protein, 481 aa, Listeria monocytogenes
MWRLTGNSSLPIYLQIVDLIETKIMNGELLPEEKLPPERQLAEMFGVNRSTVVRALDELTARAVIIRKQGSGTTVNAEKWGLFAGQSTNWRHYLTQGGFTPAVPYIRQAGVMERANSDNVIDAASGELPLEMTPKMETPSLSWQSFIAEEQQEDEAGYKPLRETIQKQMKEAYGLQTRSEQIFITSGAQQALFLITQCLLKPGDAVAIESPSYFYSLSLFQSAGLRIFALPMDEDGVVISELRDLYHKHRVKMVFVNPTFQNPTGLVMSLKRRKELVKICAHLQIPIVEDDPFSELGALDNQIPAPLKRLDTDNVLYIGSLSKIMGSTTRIGWLIGPTAVIERLALARQEMDFGLSIFPQVLANSVLNTAGYKAHLLQLHHVLEQRRDDLIEAFEAILPSEVTFIKPKGGFHLWVKLPVEFRSVRDFDIFLANDLLVMPGFLFGVKEAVIRVTYARLEKKEARRVAEIIKQILVSKKCEEA

SEQ ID NO: 1134 - protein, 276 aa, Listeria monocytogenes
MNESNGSMELYLREHTEEIINNWLSKIYENTYTSFVYSPQYKDELRADSEQTADLIISYFAGKKAFFEKLDKWLDNMYARRMENEVPLPEVITTLDKLRREFVTAVGDFCIHNDEVSKCEFSSSMAMVNHGFDRINEAFSAMYYNDIVKHLEQQHRLIEEISTPVISITDKLAILPLMGRVDRERAEKLSEITANKCVHLGVEQLCIDLSGITYFDDALGEMLTNLVTMLKLLGVEAFISGIQPKMAQQINRVDLNLSIPAYHSLKAVLQDQTRTI

SEQ ID NO: 1135 - protein, 270 aa, Listeria monocytogenes
MYKIIAIDIDGTLLNDTHEITPAVRDSIKAAKAKGVKVVLCTGRPLAGIKKSLIELDLLDEGDYAITFNGAVVLETASEKTLADITLNKTELEEIYAFCHAENVNVTYFDGKNMYVPSRKITEITCQDSLLLGTPLYHLPVEEAPESIHVSKVMLLDSPEKITDVIKKLPENIKEKFYVVRSVPYNLEFLQKGVNKGSALASLADKLGVDQSEVMSIGDQENDITMIEYAGMGVAMGNATEHIKEIANYTTTTNNEDGVAQAIQMLILDR

SEQ ID NO: 1136 - protein, 139 aa, Listeria monocytogenes
LDFHKEVEKTFKGYEQKYQLMLTKIDNNEVAFIGENYALGIGWSTDGIDWHYFKLDNSMLCKFSLDNLLNAKLTHIERDGLFPSKTICEKIINELIICERVFNNHFQELLRGETLSDYGNKEFVSNLEKSIIERELLTR

SEQ ID NO: 1137 - protein, 779 aa, Listeria monocytogenes
MRKVRISVRRLVEFVRRSGSIDNRMTSSDRALEGTKIHQLLQKEAGEEYAAEVRLNLDRIVDGIAFSLDGRADGIINGRMIDEIKTTETPMDEITENFRPLHWAQLICYGFMLAEKSDLAEVTLQLTYYQVVDKEVKQFQRVMSREELSVFVDDLLSQYAIWAKASAAWEMKRNKTIQELTFPYDSYRSGQRELAIAVYRTISSEESLFCEAPTGIGKTMSTLFPGIKAMGEGKTDKLFYFTAKTITRQVAEDALDEMRRKGLAARSVTITAKDKICFLDERKCEPDHCQFARGYYDRLNEALFDMLQSEEAITRQVVESYARKYTLCPFELSLDVALFCDVIVCDYNYLFDPVVYLKRFFAEGPGKYTFLVDEVHNLVDRARSMYSATLKKSAVMQVKRGLDAKNNKRLLNAINVMNKDMIALNKKLKDLDGTIYVQKNELIDWNESVLKFTFVAKEWLPQNTQSEIQADVLELYFESLRYVAIADFYDDRYVTQVTKSHGDLEIKQVCLDPSFLLSERLKLGSSSVLFSATLRPIDYYTNLLGGQEDTSRMIFSSPFKQKNMHLLVADYISTKYQMRENSMEAVVDALYALVSGENGNYLFFFPSFLYLQKVYDLFKEKYPNIRLQKQETAMDEERREHFLERFQAENVETLIGFCVLGGVFSEGVDLRGNRLVGAAVVGVGLAQLNHESDLIKDYYNETIGRGFDYAYQIPGMNKVLQAVGRVIRGESDRGVVLLIEERFSADRYRALFPTHWNHAKTVKSTDDISREVAGFWRNS

SEQ ID NO: 1138 - protein, 226 aa, Listeria monocytogenes
MPKNLYNYQEFIRLSHEGKIAYEQIDVPKNASLLTEKIDIDNHIYLVVDGYIALILNDGSQNSKIYSIQGKGTFLNYFTLLDQSNNHFNFKTLSGCSLYKYSKADMEYFLSMFPENFGFQFFIMKNQTTHVYFKSLMASSPASEKLKTTFSNMALLHGVLSDDGTVILPQAIKTSHLLSYSNLSKSCFYKDLQYLKTTNQIEKKEKCWIIHDQALYTMIQNGQTSF

SEQ ID NO: 1139 - protein, 268 aa, Listeria monocytogenes
MEMFLYGFMQRAFQASMIIAIIAPLLGVFLIIRRQSLMADTLSHVSLAGVAFGLVLNVNPSVTTLIVVVIAALGIEYLRGVYVTYSELSIAILMAGGLAVALVLMSLDQGGITTSVQQYLFGSIVTISKAQVQLLVILGVAIVVLFLVFKRFMFVLTFSEDVAVAEGVPVRLISLLFSVVTGIAIAVIMPIAGALLVSALIILPAAIGMRISKGFLMCVISAILIGLVGMFSGLVSSYQLGTPPGATITLMFIILFIISTVVLKLIRK

SEQ ID NO: 1140 - protein, 234 aa, Listeria monocytogenes
MKYIDIANIGFKYESEPVLENISFQVSAGEFIILTGENGAAKSTLLRIILGILQPDKGSVTFAKKNADGGRLLTGYVPQQIASFNAGFPSTVLELVRSGRFPNGKWFKRLTTKDHAHVEKALKSVEMWDYRHKRIGELSGGQKQRICLARMFATDPDILILDEPQTAMDKQSKIRFYNLLKHEAQVHGKAILMVTHDSEEMEDFVDKHIRLIRKEDVSWKCFSMDLCKEPSKRP

SEQ ID NO: 1141 - protein, 313 aa, Listeria monocytogenes
MKKWSFLVVTVLAFVLVLAGCGASNDKVSGDKDKLKVVTTFYPMYDFTKNVAGDNASIEMLIDAGTEPHDYEPSAKDIAKIEAADVFVYNSEDMETWVPSVLKSLDSKKLTVIDASKGIELVEGTEEEDHDHEHEEGHHHEHDPHVWLSPVLAEQEVTNIQNGLTKADKTNADTYKKNAETYKEKLKTLDNKFKTAFEGAKQRDFVTQHAAFQYLAKEYDLHQVAIAGLSPDQEPSPARLAELQKYVKENNISTIYFEEVASPKVAETLANETGAKLEVLSPIEGITDKEQKKGMDYIAYMEQNLQALQKTIK

SEQ ID NO: 1142 - protein, 917 aa, Listeria monocytogenes
LKKLVKSAVVFASLVFIGTSATMITEKASAASIDPVQKVDGQATYIPKGVRDGTATEEHDGFEDGTNSVLQQVPLLRATTGYPDVNAYIKSNKFSTAKIEKQLKSQFPKFNYRNGYGKPEGIVIHETANNSSTITGEINYMSTNYNNAFVHAFVDKSRIIQIHPTENGVWGAGQYANARFIQVELVRSKTFDEFARSINNYAYYAAYLLDQYNLPVDSAHSDGKGTVWSHDAVTRYLGGTTHTDPVAYFNQWGYNFNNFVSLINEKYKAMQVNYEKIEYDKAITAYSRVKTATGNSVWTKPNKTEGAKLVNPLSSYSGKNLRIIREAKTSGGTIWYQFSIGGKTIGWVDSKALNTFYTPSMEKTITGTRYVLPSKQTVHYYGLPVEDSAIDRGPLSKFNGQALTLQREATIEGQLWYRVKDLGWVKAANLTTTKYDLIEYDKAITAYSRVKTAAGNYVWSKPNKTEGAKQGSALSTYSGKNMRIIREAKTSSGTIWYQFSIDGKTIGWVDTKALNTFYTPSMEKNLTATRYVAPGQETQHYYGLPVADSAIDRGPLSKFAGQTLTVQREATIEGQLWYRVKDLGWTKASTLTATQYDKLEYDKAITAYSRVKTATGNSVWTKPYRTSGYKLVNPLSSYAGKNLRIIREAKTSSGIWYQFSIGGKTIGWVDSKALNTFYTPSMEKTITGTRYVLPSKQTVHYYGLPVEDSAIDRGPLSKFNGQALTLQREATIEGQLWYRVKDLGWVKAANLTTTKFDTLSYDKAITAYSRVKTATGNSVWTKPNKIEGAQKISALSTYSGKNMRILREAKTSSGTIWYQFSVGGKTIGWVETKALNTFYTPSMEKNLTATRYVLTSKKNEHYYGLPVVDSAIDRGPLSKFSGKTLTVQREATIEGQLWYRVKDLGWTKAANLSAKKQ

SEQ ID NO: 1143 - protein, 122 aa, Listeria monocytogenes
MKLDDNAKEIILKKSEFLLHNNFKLIEITDATITFSNKKIAFVIGYERYDNVSNINIKFLEENEMFNLGWIAFVRRNQTPLPQNKLDNILELLDYAEKNYAKVINLQFCQESRGMIEDFLKE

SEQ ID NO: 1144 - protein, 532 aa, Listeria monocytogenes
MTKYIFVTGGVVSSIGKGITAASLGRLLKNRGLSVTIQKFDPYINVDPGTMSPYQHGEVYVTDDGAETDLDLGHYERFIDINLNKYSNVTTGKVYSEVIKKERRGDYLGGTVQVIPHITNELKDRVFRAARMTNSDIIITEIGGTVGDIESLPFLEAIRQIKGDVGAENVLYIHTTLIPYIKAAGEMKTKPTQHSVKELRSLGIQPNIIVVRTEQPVSQEMKDKIALFCDIKASEVIESRDEETLYNVPLSLQKQKMDDIVLEHLQLEAPQAEMTDWKNLVHRVKNLSKKVRIGLVGKYVSLQDAYLSVAEALRHAGYDHDAEIEIDWIDSEKVTKENVAEIMKDVDGILVPGGFGDRAIEGKIAAIEYARVNKVPYFGICLGMQLATVEFARNVLGLEGAHSAEIEPETNHNIIDLLPEQKNIENMGGTLRLGLYPARIKQGTKAEAAYGTTLVEERHRHRYEFNNEYREQMEEAGMIVSATSPDGRLVEVVELIDHPWFVACQYHPEFISRPNRPQSLFKDFVGAALKNK

SEQ ID NO: 1145 - protein, 178 aa, Listeria monocytogenes
LDLKNLTQEERSELSLIDVAHFILEQRKETILFPELVKEIQAFLGLKDAEIRERLVQFYTDMNIDGNFISLGNNTWGLRAWYPMDAIDEEVQTQTTPKKKRKSDDDEDEDEEILDDDVDYDDEEIVEELGEEEISLADVLLDEDEDDDDHLPDGIEGDLATVEDDYTDGDYTEDPEDK

SEQ ID NO: 1146 - protein, 556 aa, Listeria monocytogenes
MNVMQENQIKLIEHIKQAVVQAVGLEETEVPEILLEVPKDKKHGDYSTNIAMQLARVAKKAPRQIAESIVPELKKDNKLIKEVEIAGPGFINFYLDNAYLTDLVPVILTEDKKYGESDFGKGEKFQIEFVSANPTGDLHLGHARGAAIGDSLANIMKMAGFDVSREYYINDAGNQINNLVLSAEARYFEALGLESEFPEDGYRGADIISLGKDLAAKYGDKYVHTSEEERRSIFRVDALAFETGKLRADLEEFRVSFDEWFSETSLYEENKVLPALERLRENGYIYEQDGATWLRTTDFEDDKDRVLIKSDGSYTYFLPDIAYHLNKLERGFDVLIDIWGADHHGYIPRMRAAIEALGYSPNQLEVEIIQLVHLFEDGVQVKMSKRTGKSVTMRDLIEEVGLDATRYFFAMRSSDTHMNFDMSLAKSTSNDNPVYYVQYAHARISSILRSGKEQGLEVTKDADMSLLQTEAEYDLLKVLGEFADVVAEAAAKRAPHRIVRYLNDLASAFHRFYNSNKVLDMDNLEVTKARLALIKTAQITLRNGLTLLGVSAPEKM

SEQ ID NO: 1147 - protein, 149 aa, Listeria monocytogenes
MTANQMERKKVTIHITNVIRQMDAEEKSDMSVSGVFYRDKGNRYLHYEEKQLAGTIRTVLKIADNELLLMRSGAVNMRMHFFRDNRRSTASVDSGAGKLQLESELVSMEELYENKPDVLSEVAFQYDLLSHGEYIGSYTVLMKIEEDAE

SEQ ID NO: 1148 - protein, 217 aa, Listeria monocytogenes
MPSFLAYPLEMIPYVLVTLLIAFTIHEWAHALVALAFGDDTAKNEGRLSLNPMVHIDLFGLLMILIAGFGWAKPTPVNRFKLKKRRLGSILVSLAGPVSNLLLAMVGVGFYALFLNYSFFTYGSVAETFLMIFVQLNLVLFVFNLIPLPPLDGYQILVEFLPMSTRSKLEPLERYAMLIFLVVALTPISAFTIQPIFNTVIPFVLNVILTIFGLTSF

SEQ ID NO: 1149 - protein, 440 aa, Listeria monocytogenes
MSYLTEKLREEKVFKDPVHGYVHVSDKIVWDLIATKEFQRLRRIHQLGTTSLTFHGAEHSRFNHSLGVYEIVRQIIDVTFANEPQLNPEERMVALCAALLHDLGHGPFSHAFEKVFGTDHEAYTQEIIIGDTEVSEVLMRAGEEFPLKVAAIIKKNYPNQTLVKLISSQIDADRMDYLLRDAYYTGVSYGKFDLERILRVLRPSPDGNGVIVKYSGMHAVEDYIMSRYQMYQQVYFHPVSRSGEVLLWKILERAKKLYCAGYEFQVTPVQVLPFFLNEVSLKDYIVLDDIVLMYYFSIWQEEEDPILSDLCSRFLNRRLLRYINYDPKEDAELYAELKGLLEKADIDPSYYLVIDSSSDLPYDYYLPGVGSGKDPIKLLMGNGELRELSTESPVVEAIGRERRTDIKLYYPLDFIESGDVDQAITERMIALIHAHSLKEK

SEQ ID NO: 1150 - protein, 278 aa, Listeria monocytogenes
MNIENTLLKQDVWRFIDNTTINPAFDAIQSFATDDTLCRSVGARMAPSTVRGWVHEKTVSLGIQDSKLPDIDKGIAFLQKQGYRVVVRNSGGLAVVLDSGVLNLSMVLPDAERGIAIERGYETMFTLIKDMFVDCNEVIEAKEIEDSYCPGSYDLSIQGKKFAGISQRRMAKGVAVQIYLAIDGDQTTRSELIRDFYTISGKAKQTKYTFPDVNPNVMGSLSDLMKNDISLNGTLVRLFNSLRHYAGDLVSGTLTSEELDLFPAYYERLIARNDKVLT

SEQ ID NO: 1151 - protein, 107 aa, Listeria monocytogenes
MKKGLFGLLAAIFVLTMVVIEFSAPIGSAANTYYVTIKNDGKEVTKSKFKGYSFRESCLDNQGNSHKVNFMSTTQLKKNKQYKIVVQDNELLVQAKEINSVPLASSK

SEQ ID NO: 1152 - protein, 138 aa, Listeria monocytogenes
LTIWTLINISLSGIKLKTSPWETTTVLGTYVSDTQNVLTELGNIKSLDFGMKKNRFNLLNAPDELYINPKQFWEEFNQPFLDKAIQRGDDVAMATKPTVENLYIAGTKQLTGFGREYKYLLQHGYAYDVKTSTMKLKK

SEQ ID NO: 1153 - protein, 553 aa, Listeria monocytogenes
LHKTARKMVVALSLLCLLVLTACQSGDKGESEKVTSDKKAKVVNIMETSGIPNASPTLADNSVSFRVINQIFEGLYRLDKNGKPALALAASEPEEKDGGKTLIFKIREDANWSNGDPVTAQDFEYAWKKVVDPKTAAAYGPQMEEIVKNATQILKGEMSPDELGIKALDDKTLQIELENPVPIFKELLTTGTFFPQNQAFVEKQGDRYGTKSDTLISNGPYKLENWNGTNMTWDYVKNPTYWDKKNVPTEKIHVTVVKDTNAALNLYNTNKLDRVELDGEFVKQYKDDKNFHKEATGRSVYMKMNQGKDGVKTDLANLNLRRGLAMAIDKTGMVNTLLANGSKALNGDVPGDIMFDPETKEDFRKQNGDLLKFDQQEATNAWKQGLKEIGKSELTLTLTSGDTSLQRKQTEFIQNQLEENLPGLTIKLKNVTNQASFQADVTQEFELLLGGWGGDYQDPLTYLNLFLTNSPGNHTGFSDAKYDELVLGAKGKLSADPEKRWQALLEAEQILLKDNAVLIPLYQGGRAYLQKSNLKNYTTYPIGSENYKWIEKN

SEQ ID NO: 1154 - protein, 204 aa, Listeria monocytogenes
MRKVGIFPSMIILFTVGISAVLYPLLPSEVAVHFGTDFSPDMFMQKWLGLILIPFLMIMFTGTEYYGKEKVNQESLLEFEYCFRLLLVLLTIIQMSIIVYALGYDIPTGRFSLVTAGAFMFVVAAYIQYSKKLFKFLTMIGFKKIDAWSRNLLRKITTVTLNIAGTICFILALFMRNDPSYLMLAMLMTMCVIVVGSGVYLNKK

SEQ ID NO: 1155 - protein, 210 aa, Listeria monocytogenes
MKIAAFDIDAQKGFTPLCPDELPVSGGDKIVPELNFMASLASLRIGSKDAHPQNAVWVVDSKDEMLAELEYPNADRTWVRHCEPGTKGFELLDGLPVVTDYDYFIWKGMEPDIHPYGACYHDIVEHLSTGVLEYLREQKVDLVLVGGLAFDFCVKTTVIQLSRAGFSVLVYLPATRALSEQGFDETKEQLANTEKVQLIETREELVAYCQ

SEQ ID NO: 1156 - protein, 174 aa, Listeria monocytogenes
MSEKQVALYIAVSLDGYIADENGSVEWLESIDSEGDAGYEAFFDNVDTVVMGRTTYQQIFSLTDTFPYSKKDVYVFSNTKAGTKDEYADFVAGTVDTWLNNIDGEKIWLVGGAKLVQQFLKERAIDRFVITIAPIILGKGIPLFEEDQEHALELEEVTRFGQFAQLTYKNLEEN

SEQ ID NO: 1157 - protein, 332 aa, Listeria monocytogenes
MKAVGLTKASTDFVDIEIDKPVPENHDLLVKIKAISINPVDTKQREAAKLSGEEVRILGWDAVGEVVDTGSEVTLFQTGQDVYFAGDVTRPGVYAEYTLIDERLVGLKPHNLNVEEAAAMPLTTITAWEALFDRLTITENDKGKSILIINGAGGVGSIATQLAANTGLEVIATASRSETVEWTKSHGANYVINHRENIPEQLEELGFKKGVDFILCLHNTSAHWDEMQEAIRPQGKICSIVELTEPVEMTLLKDKSATFSYEFMFTRSKYDTADKIRQHEILTEAAHMLDKGNLTTTLNQVLSPVNAATIEEAHKIISSGKMIGKLVVKGFE

SEQ ID NO: 1158 - protein, 90 aa, Listeria monocytogenes
MEEQVDLGHFLKKAFIAIGALTLVFIGVLAMFTIIGVIIAIPLLKKASKMLLSKKEDSDHTHSHGGKLKIKCPACHAKMKFKDSELLDEK

SEQ ID NO: 1159 - protein, 303 aa, Listeria monocytogenes
MAHNHDHAHGHNHNHAHNANKKSLFISFILIATFMVVEVIGGIMTNSLALLSDAGHMLSDAVALGLSLAAFKFGEKAASSDKTYGYKRFEILAAFLNGLTLVGISVFIFYEAIGRFFDPPQVIGAGMMTISVIGLLINILVAWILMKGDTSENLNMRSAFLHVLGDLLGSVGAIIAALLIIFLGWNIADPIASVIVAALILVSGWRVLKDAIHILMEGKPANVDTEEIKTFFQQQDGVKEVHDLHVWAITSDFNALSAHLTVCEDADRDKILADIEHYLQENFSLEHSTIQLEGNHAHHHHCN

SEQ ID NO: 1160 - protein, 381 aa, Listeria monocytogenes
LTTKKAFTDEEYFKLSEAVYQDGTLNSKKINIELSDRTKSNWKVVSKLNDRATNTQAFAVIPEEKGKDGKIYYNHNNMIFVYRGTKESKDFGSDIINVFAGKNSRTSLDRKSKNPFQVSKEWTEEVLKEFNPKNPTSTGHSLGGALSHYNSILYDFNATTYAAPNIYQLLPEDKQKKVRDGFYNNSIIDFTHDDDMIGTFDQFSSPIVGSQYIAERNNVKVGVKGVFGAIPGHYNETFEGCFSSDGTMKLKVDVDSIIKHAQDIDNIIQSLQTNNDDLENLEEKLQIGSKKIQNQLEEEKRIGGVYSELTTWDIDDVLTELCTKYKNGVYCFYNPNEFEKYYEMNHQTRRLLKNFQIELVDAAQSFRETNTSLGEWISNNN

SEQ ID NO: 1161 - protein, 285 aa, Listeria monocytogenes
MNPSPLRYPGGKHKMYKYIKKLVAVNDIDTYIEPFCGGSGLALELLLSKDVNRIIINDYDYSIYCFWKSVLDYTDELIDMINSSEVTIEEWFRQKEIRKDIYDHSVVEVGFSTLFLNRTNRSGIIDKAGPIGGYQQTGNYLIDCRFNKEKLIEKILKIAQVKDKIEIYNLEALDFIDDVIKVEKNGFTFFDPPYYQKGQGLYTNFYSTGDHQTLSQKIINELKNKKWIVTYDLAPEISRMYNKIDSICFTLSYTLQEKKRGAEFLFFSKKTRRIKDSEYLHFLEV

SEQ ID NO: 1162 - protein, 127 aa, Listeria monocytogenes
MQHQEQEKNQAFFNEQKEKVTLYLKHNIPDFKTVTFTNEEFNPIGISIDGYINNDKNLSFTAGKDVKIFSCSDELDKMFKEPRKGYDEIIEKEETSLEMPKEKTKTINEILSDLKSYEDQIITQNKI

SEQ ID NO: 1163 - protein, 358 aa, Listeria monocytogenes
MTNTLKTSYQKTPYKLGGNGPRNVGVLTEALQNIDDNLESDIYGNGAVIEDFETKIAKILGKQSAVFFPSGTMAQQIALRIWADRKENRRVAYHPLSHLEIHEQDGLKELQQITPLLLGTANQLLTIDDIKSLREPVSSVLIELPQREIGGQLPAFEELEKISEYCHEQGISLHLDGARLWEITPFYQKSAEEICALFDSVYVSFYKGIGGIAGAILAGNDDFVQEAKIWKRRYGGDLISLYPYILSADYYFEKRIGKMAEYFEAAKGLAERFNSCSGVKTVPEVPVSNMFHVYFENSADEIGAILTKIQDETGVGISGYLQEKSADVCAFEVSVGDAFAEIPAKNLELVFRCLEKEL

SEQ ID NO: 1164 - protein, 421 aa, Listeria monocytogenes
MNLVALLKYMQENYGEQRTNYPMAGNEVAKKFKQGVKTAFETTLLGEDYEISASIGTGGWANVPWIAVHDKEISTSVQEGVNLVYLFTNDYQGVYLSLNQGYTYVNKNYKNTKLTLGKIARFWQGNLSTLKSENGFTIDPINLGRKESRYTNLVKGYESCNIYSKYYDIKDLEETDNDLLSQDLLQMLTVFKELKGHLMLDDKKGIEATIDFIINNGTFNELSEKAKSEKIVEIEKKRKLVLGKEETHSRNSVVKEEKVPYITKRDYAKEAIRNTEKGLQGEYLVINYEKERLIKNSITKPYADKINHVAESGDGHGYDIISYDINPDAPNEVIEIYIEVKTTTGNRDAPFYLSDNELNVARIKGELYKIYRVYDYNTVPKLKIIDNLFDETLEIKPINYIVKGVNQNDKHTKNQLPKNTL

SEQ ID NO: 1165 - protein, 184 aa, Listeria monocytogenes
MSKKLVSIIFLGICLLLVGCGKEVVDSKYTGKWKLESSGIGMSDGSNYKETDAAGKVSLDLDIDAEGNVKELYIDDAVAITNSYKLKKKGDDEYQYDGTLISKKVYSYETESDKENVETMLKFLKSKDNVKITKNEQKGDEYHIDVKADEKDFVFSLEMQSGKLIFKKVDTKEKVLIKETYKKN

SEQ ID NO: 1166 - protein, 94 aa, Listeria monocytogenes
MKKTVHGWEIISSLDVRVYQDEAGGVAILVDRDNFGDQVPVLLNFGDDGVDIKALSHLTKSVRVSLDKKVRIEWHDEYFEERTQAMECIEVERD

SEQ ID NO: 1167 - protein, 113 aa, Listeria monocytogenes
VTDSNELTTELDSMAIILHAGNAKSCAFEALKEVKLQNIEAFTQKITEAKDEIKLAHRAHAELLRKLSSENRMREVDLLLVHAEGHLSSTDIAVEMIRELGEIYQWKWSLSNE

SEQ ID NO: 1168 - protein, 463 aa, Listeria monocytogenes
MNNNFLWGGATASYQCEGAWDVDGKAESMWDYYLHEAGLENGDVASDHYHRYEEDIRMMKEGGQNSYRFSLSWPRIIKNRQGDINLKGIEFYQNLLDTCKKYDIEPFVTLYHWDLPQYWEETGGWLDHDVCAAFEHYAKVCYDHFGDKITNWTTFNEPKWFVANGYKIGNYPPGYQDTQKTMIAAYNVMYASALGVKAFKEGGYPGQIGIVHSYTPVNGIDESIETKIAMRYADNYCNNWILDTAALGEFPVDLIAELAKSHDISFMKTDELQTIKQNTVDFIGLNYYSRTLVKPYTGGETQLQFNHSGKKGESKVLIKNWFEQVKDPANETTEWDTEIYPKGLQDGLIEAYERYQLPLYVTENGIGVREDVSVPQVDDAYRIAFMNDHINAIFNAIDAGCDVRGYYAWSPFDLYSWKNGVEKRYGLVAVDFENNQIRKPKASYYWFKEMIESQGKLIKRREF

SEQ ID NO: 1169 - protein, 96 aa, Listeria monocytogenes
MKNIMLVCNAGMSTGMLAKKIEAASGNTLNVTAYSESEYTDYLDGVDLVLIGPQIRFLMPQIKQAVSVPVHAISPVKYGIMDGKGVYEDIQKLIGG

SEQ ID NO: 1170 - protein, 437 aa, Listeria monocytogenes
MRFNTISEKMDQYISPLANKLSQQRHLKATRDAFMSMLPITLFGSIPIILKAAPVTDDTKNGFLLAWANFAEKYDLILNWISGITLGAMSLYICVGITYYLCKHYHEDFLRPLMFSIAGFFMLVLNPIKMGWDGKEVDISFLDGRGILLSIFVAIVTVEGYHWMRKKNVGRITMPDSVPASLSETFAALVPGIILMTFFSIIFIIFNLLDTTAIQFLYEKMAPSFKAADSLPFTILSIFLVHLFWFFGVHDAALAGILGPIRDGNLSINAAEKMAGQDLTNIFTTPFWTYFVIIGGSGSVLALAFLMMRSKSKQLSTVGKVGFLPSIFGISEPLIFGTPLMLNPIFFFPFIFTSVFNGVITYLCMYFGIVGKTFAVFSWQMPAPIGAFLSTMDWRAIVLVFILIFLNGLMYYPFLKVYEKNLVALEKEAEEENIAAN

SEQ ID NO: 1171 - protein, 623 aa, Listeria monocytogenes
MTISERQRSLLEKLNDSQKTVTAKALSEMLGVSSKTVRNDIMQINQSFSSTIIASKAGKGYFLMPNEQLSQMNLTKNNENLHFELLRHIIEQDHTNFYDLADQFFISESTLARIIKELNIVIAEKDESLCIIRKNNELLTEGGEEEKRRIFNLFLNQEIENHQLSLDKYADYFDYCNLKQLSELIIAYHKKHEFFMNDFSTISFILHIAVLIERISMGSYIERTALLEQDKTSLEMAAHLAETLEKELQINIPTQELSYIARLYSGKLTTTSTIDAQVFGSVVTRLLEAVDQNFHIDFSADEKIATYLVAHISALYKRANHKQYLTNPLTEELKNKFPFIYNVSVYASAFIQKELAITFPDDEIAYIALHFLSASETINHGKKRKILLVTPYGAGSQRLIHNQLKKIPDFSIDLLVSQSIFDIKQFTLDKEIHLILTAEPLNLTTDIPVYHYDLLLAESDLQKIKHILETKQKTESISRKFFKKELFFPKQNFKSKEETITFLCEQLTAFDYCAPDYVAKVFEREQLSSTCYGNYYAIPHAIQRSAKKNAVAVCSLDKPIDWGGNRVKLVLLLTMKEERDNSFEELFGQLVTILNERSFVKKLAKQEDFQQFIELCEQKTLDS

SEQ ID NO: 1172 - protein, 212 aa, Listeria monocytogenes
MKFLKKYGFYFLLLGVLSDFLTPYILGIFYPELNQMTRVMSVFGDVTSPVRGAFLVWSVVSGVFFVLALPAIYQSVVKTSRTLAILLASAIGLYGIGDCIFTGLFSIDTEQASWTFSTWVHNIGSGLGYAGFLIFPLFLVILYRKTGDKTRSNIYLVLLIVSLLSAGVYGLARIPAVNDLPVLDKIGFCQRISFFFNYLPIVVFGIDRIRKP

SEQ ID NO: 1173 - protein, 245 aa, Listeria monocytogenes
MNTTIQQLVKHVSVREFKNERLSDETKQHLLTAARSASSSHFVQSFSILEITDEKLRKELAEITNSASYVNQTGTFYVFVGDLYRQSKLLLENNRTLDGLRNMESLLVSVIDATIAAQNMVIAAESLDLGICYIGGIRNDIGKVAELLNLPPFTIPVFGLTVGVPEYKNQVKPRLLLENQVGENQYPHEQFTDLKAYEELTKDYYALREKNQHQTSWGDKNVEFFEEIRRPEIASFLKKQGFTLD

SEQ ID NO: 1174 - protein, 287 aa, Listeria monocytogenes
MDIENMKAFNKVAELKSISAAANELHHLQSNMSNKIKNIEKQFQTQLFFRHSNGVELTKEGEKIYQQFKKMILLWEETIDIINNEEETISIGITQSSLPMEFNTIIKKFYQQFPNKKLSIVSGSTSELIPKIANRELTIAYVAELEKENLFQDSQIISQTLSWDKLVFAGNTAGKSVQKILAEERLYVFSKQCYSYRALATLINDFNIPNVSISEINIPETLVEICNNKLGVGIIPESIALNYHFLNYETLPTEYAALRKTLIYHADHTISNGEKWLIEKSKPAFKS

SEQ ID NO: 1175 - protein, 159 aa, Listeria monocytogenes
MNIQIVTVGKLKEKYLVQGIAEYLKRLSAYAKVTIVEVPDEKAPEVLSDAEMKQVKDKEGARILAKIPDDAYVIALAIDGKMKSSEEFAADLDKLATYGKSKVTFVIGGSLGLSEAVLKRSNERISFGRLTLPHQLMRLVLVEQVYRAFRIVRGEPYHK

SEQ ID NO: 1176 - protein, 324 aa, Listeria monocytogenes
VSLYMLVSTFAVAFIITVIGVPLFIPFLVKLKFGQSIRDEGPKMHEKKSGTPTMGAVVFITAMLISFLVFSFISGEVSAATWLLFIALALFGALGFLDDYIKVVQKRNLGLTSKQKFLGQVVISILFYLVYHFNDFAETLNIPFTNIEVDLGWFFVIFILFWLVGFSNAVNLTDGLDGLVSGLSVIAFSAFGVIAFYQEQMDVAIFCFAIVGGMLGFLLFNKNPAKIFMGDTGSLALGGSIAAISILVHQEWLLLLIGIIFVIETASVILQVFYFKATGGKRIFRMTPIHHHFELGGWSEWRVVLTFWGIGLVGAIISVCVVIF

SEQ ID NO: 1177 - protein, 579 aa, Listeria monocytogenes
MRKSSWIIPYIKENRGLFLLVIFLGTLTFASAGALMFTSGHLISKSSLMPESIMAVYISTVGVRAFGIMRSVSRYVERLSSHSLVLRILEKMRVRLYRLLEPQALLLKSRYKTGDILGLLAGDIEHLQNFYLTTMLPAIVSLVLYAGVVIALGAFSIPFAALFVLLIGLLVLVLPWVSLLYARGKNAYLKQGRNSLYQKFTDAVFGISDWKFSGREKTFISNYEKDEADMLRTENKQFHFVNWRDFFSQLVVGFMVIVMVYWSTAESRDGAFSGTLIAAFVLAIMALAEAFVPVSSAISDKSLYQDSLARLDKIEDPALPTFEEETKEIERINTENVVLKAENLTFAYDEKSPEILNGFDFTLQQGEKVAIIGRSGTGKSTFLKLVQGALLPTAGKVTMNDVEVEKLRPQIPELTSMLNQKAHLFSTTVLNNIRLGNQDASDEEVYEAAKKVQLHDFIMSMPDGYHTQMSEMGERFSGGERGRIALARILLQNTPIVILDEPTVGLDPITERDLLATIFETLADKSLIWVTHHLVGAEKMDRVLFLEEGKTLMEGPHAELMAEEPRYKRLYQLDRPIEL

SEQ ID NO: 1178 - protein, 455 aa, Listeria monocytogenes
MKKIEMYHHKKVLVLGLARSGVSAATIMHKLGAFVTVNDQKPFSENPEAQGLLEQGIKVICGSHPIELLDEGFELVIKNPGIPYNNPMIEKALKLKIPVITEVELAYQISEAPIVGITGTNGKTTTTTIIHHMLNTHKENSSLLAGNIGFPASAVAENATSDQYISMELSSFQLMGVETFKPHISVITNIYEAHLDYHTDRSEYVQAKWHIQKNQIADDFLVINWDQEELKNLTKQTKAQVIPFSTTQRLGQGSYVQNGNIMFNDEVIGERDNILLPGEHNLENVLASVAVAKTLGVTNEEIMHVLETFKGVEHRTQFVVEWQGRKFYNDSKATNILATQSALKGFKNPVVLLAGGLDRGNSFDELLPFFKNVKTLIVFGETADKIGRVGKIAGIEVHYVDNVEAAVPVAYRESAPGDIILLSPACASWDQYRTFEVRGNAYMDAIGELIEEVEK

SEQ ID NO: 1179 - protein, 363 aa, Listeria monocytogenes
MKVAISGGGTGGHVYPALALIRELKKSHPEAEFLYIGTEKGLEAGIVKREGIPFEAIEITGFKRSLSLENIKTVMRFLSGAKKSKQILRDFKPDVVIGTGGYVCGPVVYAAAKLKIPTLIHEQNSVAGLTNKFLSRYTDKVAICFEEVSDSFASEKIVFTGNPRASEVVGVDSEGALEAYGLVSGKPTVLVFGGSRGARGVNEAVEAVLPEWNNRDFQLLYVTGDVHYEKIKDSLAELNLGNHISVQPFIYDMPKILNAVTLVVSRAGATTLAELTALGVPSILIPSPYVTANHQENNARALEKNNAAIVITEAELKNTDLMATVDSILNDEAKLNSMKLSAKQMGRPDAAAKLVEAVLSIMK

SEQ ID NO: 1180 - protein, 270 aa, Listeria monocytogenes
MAENKRVISIENRIPELKKYRKKKLVRHLAILIGIFVILIAITLYFLSPLSKLDKIAVSGNKQLTENEVRKESGLEIGEFVIGISNGKTEDALKKNTLIKDATVSKEGLNDVQINITEFKTIGYQQQDGKYYDVLESGIMLTDQPRQFPIGNDLLFQNFKNGKTLEKMVDQINKLPKDVVSSISEVIYSPTKSDKNHIKLYMNDGNQVSADISTFAEKMQHYPAIVAQLAKGQKGVIDIEVGSYFQSYYQQNAEKKATEEAAKEKKETNE

SEQ ID NO: 1181 - protein, 426 aa, Listeria monocytogenes
MGDSEIYVSLDIGTASVKVIIAEMADDRLNIIGVGNVESSGIKKGIIIDIDKTVESIKKAIEQAERMVGVEISQVIVGVVSSQVHLEACRGIVAVGSENREITDEDVWNVMDAAQVVPLSPEREIINTIPDQFVVDGLTGITDPRGMIGVRLEMEGTLITGSKTILHNTLRCVERAGLEISDIALQPLAEASISLSEDDKEFGTALVNVGAGTTTVSVFEQGRLTYTGVIPVGGDNITKDLSLGLNTSTANADRVKLDHGYAFYDDASPDEVFAIDVIGSDQKQHFTQVEVADIIEARMEEIFQLVVEELTRVGKTHLPGGYVLTGGSMAIPGAIDLAGKTLAAHVRLAIPDYIGVREPSFTTAVGLIKYAYQMAELEGRDVSSSANEPRYDDEAPKQKQPKPKQKKSDDEKVSTKMKNFFGAFFE

SEQ ID NO: 1182 - protein, 391 aa, Listeria monocytogenes
MLEFDTSSESLATIKVIGVGGGGNNAVNRMIEHGVQGVEFISVNTDAQALNLAKAETKLQIGTKLTRGLGAGAVPEIGKKAAEESREQIEEALKGSDMVFVTAGMGGGTGTGAAPVIAQIAKEMGALTVGVVTRPFGFEGPKRTKQALTGTEAMKEAVDTLIVIPNDRLLQIVDKNTPMLEAFREADNVLRQGVQGISDLIAVPGLINLDFADVKTIMTNRGSALMGIGIATGENRAAEAAKKAISSPLLETSVDGAKGVLMNITGGSNLSLYEVQEAAEIVSSASDEDVNMIFGSVINDELKDELIVTVIATGFDEAKQAQQQAQANRRPNQSIQVNRPNYAVQDEQQNDYAQNAPQQANAPVHEQQAEPQQNSSDVDVPAFIRNRNRRG

SEQ ID NO: 1183 - protein, 229 aa, Listeria monocytogenes
MTKQANLQKVTAQIEHACEESNRQSEDVTLVAVTKTIDVTGITELYDLGIRHFGENRADVFLEKTVELADKDDICWHYIGSLQTRKVKDVLPQIDYLHSLDRSSLAKEIEKRATKPVKCFLQVNISGEESKHGFSKEEALSFLQEANFTFIEIVGLMTMAPITNSDIELHHVFHELKQLQQEIHALQLKNIPCTELSMGMTNDYGIAITEGATFIRIGRALVNDDNMEV

SEQ ID NO: 1184 - protein, 152 aa, Listeria monocytogenes
MGLSNKFKSFFFLDEEEEYYEEEVAREPEPMQKKTKKEKPNKNRFYAVEEDDAKVVSMQGAQFSSRMVLAEPRVYAEAQELADYLKEYKSVVVNLQRISHDQATRIVDFLSGTVYALGGDIQRVGNNIFLCTPDNVEVDGSISEMLDEQNFM

SEQ ID NO: 1185 - protein, 156 aa, Listeria monocytogenes
MPRKGPVAKRDVLPDPIYNSKLVTRLINKMMVDGKRGKSQAILYSAFDIIAQETGKDPMEVFEQAMKNIMPLLEVKARRVGGANYQVPIEVRADRRSTLGLRWLVNYARLRGEKTMEVRVAREIMDAANNTGASVKKREDTHKMADANRAFAHYRW

SEQ ID NO: 1186 - protein, 96 aa, Listeria monocytogenes
LQSILYQVVEIVLFIIRWLPTLMFIYFLMSWFPGARESKIGQFLARIFEPILEPFRRIIPPIGMFDISSLVAYFIFQYAMRVLTGLIQVYVIPMLF

SEQ ID NO: 1187 - protein, 258 aa, Listeria monocytogenes
MDGIYQHFRAEEYAFIDKILGITMQVENEYTPQLTDFLDPRQRFITETVIGGYDEINVQFFGGVAHAERRRALIYPDYYTPTEADFEIALFHIRYPVKFTTLTHQKILGTLMSLGMKRDIFGDILNNGTEWQLLVESTMKDYLTLQLEKIGKVNVMLEETELTNAVYAPVIWEEMGLTVSSMRLDVIISNAHHISRQKAKQLVTAGLVKVNWKTVENPDFECEEEDVLSARGYGRVKVLSTGGRTKKDKIRIEIGYLK

SEQ ID NO: 1188 - protein, 366 aa, Listeria monocytogenes
MNLLETVEQDTMPTHYKQMTQVEMIARVTEIKAQLGENLFIPCHHYQKDEVVPFADAIGDSLQLAQIAAQNKKAKHIVFCGVHFMAETADMLTTSEQIVTLPDMRAGCSMADMADIHQLTNAWPKLQTLFGDTILPVTYINSTAAIKSFVGEHGGTTVTSSNATKIVSWALEQKERIFFLPDQHLGRNTAFELGIPLEHMAIWNPIKNELEYEGNLDDCKVILWKGYCSVHQHFTVKNIENIRKNHPNMRIIVHPECTHEVVSLADDSGSTKKIVTEINNAAPGTEWAVGTEANLVGRIIQENPDKKIVSLNPFMCPCMTMNRIDLPHLLWTLEAIQNGEKRNQIKVDEQTTKFALKALERMLQLS

SEQ ID NO: 1189 - protein, 281 aa, Listeria monocytogenes
MNSILMNQAIQAFLLEDIGQYDLSAGTVFPRDTMGEGVFLAKETGILCGISIPPKVYELLGGNIQFEAYKKDGDWVQKGDIIAAVKAPVRTLLSGERVILNLMQRMSGIASQTNFAIKQLDDSAIRICDTRKTAPGLRAFDKYAVQTGGGFNHRNGLYDGVMLKDNHIAFSGGITSAVSTVRGKLGHMVKIEVETETAEQVKEAVQAGADIIMFDNRTPEEIKQLVKLVPPHITTEISGNVTLENIHRYKGSGANYISLGSLTHSVRAFDISFNSKGGIKA

SEQ ID NO: 1190 - protein, 484 aa, Listeria monocytogenes
MIKERVIIVGSGISGCTAALRLMQDYDVTIITKGYKEESNSMLAQGGVAAAVSKNDTPKKHFSDTFQAGCFHNKVLAVNQLVTHGPMVIQKLIAEGMAFDEQDGELALGLEGAHQLPRILHTGGDQTGKFLTTFLQEKLTDIHWQEQKMAIEIIKQNDSAIGVHCLDKENRLHTYYGEHIILASGGLGQLFPVTTNAATISGDGLALAYRAGAKLTDMEFIQFHPTLLFLNGRCHGLISEAVRGEGAKLIRADGSAIMTDVHPRADLAPRDIVAATLFAEIQDGNEVFLDITAIPNFEKRFPGITANLDAHHIPFRETKRIPVHPGAHFLMGGIRTDLSGKTNIPGLYAIGEVANAGVHGANRLASNSLLETLVFGEKVAEYIRTQKINPIDHPEIPLSNQIQTPHLPDKQLLQEKIWETLGITRKPEKITEFLHWLTDFDYANHTRKTAEISHMLITAKLIAESALKRTESLGAHRILKGVIK

SEQ ID NO: 1191 - protein, 368 aa, Listeria monocytogenes
MIYFDHAATTKMSEAALEVFMSASREFFANSESLHDAGTKSAALLEKCRGSFAEILHVPSRGIMFTSGGTESNQIAIQTLLHSTKKKEVLVSPLEHASVWQQLEALEEAGACWLRLLPVDAFGRVDPAVLSDMISPDTGLVIIQHVNSEIGSIQPIRELAHIAKQAGVYFHTDIVQSFGKLDLTLDDVTSFSISSHKIYGPKGAGLLFIKPDVPMQVPLPNVHHEFGFRPGTVNVPAIAAFTTAAYDIMGNREKEARRIAELKKAICEALTAKVKVEGGLNTSPFILGITLPNMQGQEALLALNEADIQISTTSACSLRDPAPSRTLLATGKTIEEASRFIRLSFGRENELSDSLIFKKELDKLLRKR

SEQ ID NO: 1192 - protein, 574 aa, Listeria monocytogenes
MGKDLRNYKGIKKIMAILAVFTLVQGAAIIVMAITLARAITDLFHEHPFQSVTIQIGLFAGAYFLRHFLNVWKKQIVYRYAAKLAKTMREELLDSLFALGPRFARAEGTGKVVTMVMEGVADFRNYLELFLPKMMNMAIIPAMIWVYIAFQDWTSAFILMITLPILIVFMIILGLAAKKQADSQFETYRVLSNHFVDSLKGLETLKYLGLSHDHEGKIASVSSRYRKATMKTLRVAFMSSFALDFFTMLSIALVALFLGLGLIDGNMNLPIALSVLILAPEYFLPVREVGSDYHATLDGQEAGRVIQGIIDQAKAEKPEMDALPLTTFAENTEFSFENITVKHGADDADSLHKASFTVKGFEKIGIIGATGAGKSTLIDVLSGFLTPTSGEFHWNGKSGASLASTDWQTQVTYIPQHPYLFHDTIAGNIRFYHPNSTEDEMKKAAESAGLNKLVAGLEDGYETLVGEAGRMLSGGQEQRVALARAFLTDRPVVLMDEPTAHLDIETEYELKKPMLDLFEDRLVFFATHRLHWMLEMDRIIVLDHGAVVETGTHEELLSRKGFYYNLVKAQLEEV

SEQ ID NO: 1193 - protein, 274 aa, Listeria monocytogenes
MKDLHTDNLQISYDKRIIVDGLDIAIPANKITALVGANGSGKSTILKTMSRLMKPSKGAVYLDGKTIHSQPTRDVAKQLAILPQNPSAPDGLTVFELISYGRSPHQSSFKSITAKDREIIFWSLRVTNLTEFADRPIDSLSGGQRQRAWIAMALAQETDVLFLDEPTTFLDMTHQLDVLNLLKQLNQSENRTIVMVVHDLNHASRYAHHMIAIKEGKVIAEGTPTSVMTEQTLEDVFNIKADILIDPRSGVPLCLPYETCNGCEIVKELDSIAK

SEQ ID NO: 1194 - protein, 332 aa, Listeria monocytogenes
LPNEVYDVTIIGGGPIGLFSAFYSGLRSMKTKIIDAEPAVGGKVRYFFPEKIIRDIGGIPAITGENLVANLKQQAETFHPTIVCSERVVDVTKLADGTFQLTSHNGSIHFSKTIVIATGSGTFEVNKLEALHAEDFPFAIHYDVKNIEQFRDKVVVVSGGGNSAIDWAQTLEPIAKKVHLIYRGEDFKAHEESVRELKNSRVEIHIHHEISELIGTNNQLTEITVCCNQTQTTKTIETEALFINHGVKVDLGTMAEWGFKQADFGIVVDDEMKTTVPGIFACGDSATYPRKIRIIAAGLHEGPIAINSAKKYLEPTAADEAMISTHHESFIG

SEQ ID NO: 1195 - protein, 206 aa, Listeria monocytogenes
MDEKRLKILEAAMGEFTEKGYQAASTNKICEKAGVSKGLIFHYFGSKEKLYIAAVSYAVDFATNEVRLEGEHWGDFVEMAIWSTKMKLDFNRKFPAVFGLIMQAYGNPPVELKGKLDGFFDKAIERSEAQMNQVLSEMKLKKDVNMDAARKVMAALFKHITEISTVYLQIHPNATMEEFVPLANDFTEMMRIVEFGICEEKKDLGE

SEQ ID NO: 1196 - protein, 271 aa, Listeria monocytogenes
VNILHIEWKTRIKSLVVWAVVVIVILGVFMAFFPSMQSSGMQDLVNTKMNALPQDMMKILHMDSMADLTNIDAYFAYVFQYIFIAACVYAALIGAQALIKEETDGTIEFLYAQPITRSSLVFWKMIGNLLSFVAFWVITFLASVALVLFLKPSGVDGGNLVMELVRVFSSELLVAAVFMSAGFMVSSVLRSAKQASPVALALVFLTYILGIMAGLNDKVDFFKYFSPINYAIPSEIMDKGITGTNALISCGVIVVMVAMTFVLYKKKDLKV

SEQ ID NO: 1197 - protein, 295 aa, Listeria monocytogenes
MEAIKVESLTKNYHKKRAIENVDLSVNEGELYGFIGPNGAGKSTTIKVLLNFIYATSGGATILGKDVVKDSAEIKKMVGYVPSEVRYYPQMTANDIIHYAAKFHHIENATQKMNKYYEMFSIDPKKRFGEMSLGNKKKVAIVAGLITEPQLFILDEPTNGLDPLMQHYLFKEMTERNKEGMTIFLSSHNLREVQEYCTRAAFIRNGNIIAVEDIANQQMTGKVIALKGTNLPLEKLTNAGARIIEKEMGKARLIFDDDIKTILPLLQEKEITDLTITNQELEDKFMTLYEGGEIK

SEQ ID NO: 1198 - protein, 185 aa, Listeria monocytogenes
MDSLEEKTLHTEQIFSGNIIELQVDDVELPNGEKSKREIVKHPGAVAIIPFSEDGGMYLVEQYRKPLEKTIIEIPAGKMEPGEDPLVTARRELEEETGFQSDDLTYLTSFYTSPGFANELLHIYVARDLRKMEQPLAQDADEFINLVKVTPEEAEQLIEQQFIHDAKTMYAMQYWKLQLLIEENE

SEQ ID NO: 1199 - protein, 219 aa, Listeria monocytogenes
MTVFKKILAFTGSILLVIILGGILTSLIHSGLVIATIVIAVAAILFFFSSKAGDRAQMIATGLTKKEYKYIRTNLEEARVKIIRLQKIMTQNKALYSFQERNKTLLLTKRIYGIVKDEPKRFYEAEDFFFSHLDSLVELTEKYAFLEKQPVKDKKIYQTLSDTRTLLNDLSRVIEKDLFTLLNQDVNNLDFELEVAKNSISKQKKKFERGTKDDREQAK

SEQ ID NO: 1200 - protein, 337 aa, Listeria monocytogenes
LSLNELWFLLIAILFIGFFFLEGFDFGVGMSTRFMARNALERRVLVNTIGPFWDANEVWLLTAGGAIFAAFPNWYATMFSGYYIPLVFLLLALIGRGVSFEFRGQKDSPLWIKTWDWVIFFGSILPPFLFGVLFASLIQGMPINSDMDMYAGFFDYITVFSVWGGVTITLMCLLHGLLFITLRTEEDIQDRARRMAKRVWFITVPALVIFVVLAYFNTDMFQVRPVLVPLMIGIVVVMYVLSALFIWKDRDILAFTFGGLGIVFTIATIFVSLFPRVMISSINSAFDLTIENAASGQYSLSVMTIVAVTLLPFVLGYQIWSYYVFRKRVSSKEKMTY

SEQ ID NO: 1201 - protein, 399 aa, Listeria monocytogenes
MTENKPSEQTNELKDLVVEKEFNQTLDDLLANPFGSDGESAASIVNNETDAAPRLVDMLTETNKKQALELSKQIEPGNQAAILGYGAPAQAKLHDFSHSMLAHVQKQDVGPIGDIISDLMYRLQEADPDELAARNKNVFTKMFHRVKQSINEITSKYQKIGTQIDRIALKLEHSKKRLMEDNSFLEQLYDKNKDYFQALNIYIAAGELKLEEINTKMLPELRKKAEQTGDQMDYQEVNDLTQFADRLDKRVYDLRLSRQITIQQAPQIRLIQNTNQALAEKIQSSIMTAIPLWKNQVAIALTLLRQQQAVAAQRQVSETTNELLKRNADMLKTNAIETARENERGIVDIETLKETQSSLIETLQETLKIQQEGRAKRAVAEKELVTMEQELKERLLEMK

SEQ ID NO: 1202 - protein, 247 aa, Listeria monocytogenes
MVQSANKIINMTRDEVEKAITDFPVAILPLGATEQHGHHLPLGVDIFLADHLAELVSEKTGAVVIPPMPFGYSWVWRDIPGTISIQQHHVEAIIKDVAHSVSRYGVKMLVLINGHDSNNNSMKYAVRELADELEMPVMYLFYPSLSEVMEKNCESGTWHGMIHACEFETSLMLATKKELVQMKKAVREYPEKPTLYGKTTISLGDLSKSGVYGDASLATEEKGEQMIELFAEKMTALLLEGYGYLTK

SEQ ID NO: 1203 - protein, 202 aa, Listeria monocytogenes
LLTMEKDQLMAIIRDVAKEDFIPIVELLLEEGITMLEVSLSNETKGLACLEAVSQHFSAKQLTIGAGTVVEKNQIQKVKQAGATFIMTPGFEKSIVEECIKQDIAVFPGVFSPGEIMEGIQLGIEIFKVFPAGTLGPTYIKSLRGPFPNIHLMAVGGVDSGNIAEFKAAGCDSYAIGSELVPRGATKAMLNQIRENVKAFQR

SEQ ID NO: 1204 - protein, 305 aa, Listeria monocytogenes
MEKKIRTVLGDISKESLGFTYSHEHLWCCPPSVQKDRDFELTDYESSLEELKTFQSIGGQTLVDASTLDYGRDGNKLKTMSEESGVNVLGVTGFNKHIYFPDWVQEESIEQITDRLIYDIEKGMDGSDARAGILKSGSWYNLIHPLENKVTRAVAWAQKETGAPIWLHTEAGTMGQEMLAILEEEGVNMELVAVGHSDRNADPYYHLKLAEKGAYVQFDGCGKVKYYPDSTRVELVKNMLENGFGDKLLISGDMGRKSYLHAYGGGPGFRFIKTKFIPRLLEEGVTEQQIQTIFYDNPANWLAKF

SEQ ID NO: 1205 - protein, 422 aa, Listeria monocytogenes
MLTFITEIFSTPAFILGIIAAIGLIALRKTGSDIVKGTLKTIFGFIMLQQGSAIIVGSLIPFSTMFENAFQLKGVVAEDNAIAAAVQQILGTETSLILVFGFIINVILARTTRWKYIFLTGHMMFSFAATMAIVFDQMGFNSWQIILFGSIAQGISSIVFPALAQPFVRKVTGNDQVGFGFWGSSLVWATGWLGGKLGNKANSTEDLKVPKKLDFLKEMSVLMGIVMAVIYIFTSFFVDEPVMKELAGTQSNVLFAILQSFTFVVGILILLQGVRMFLGELVPAFKGISEKIVPGAIPALDVPVFYSFAPTATTIGFLCAVVGGLGATLVSTMLPVVVLPSVIGLFFMGGAAGVFGNAMGGRRGAIIAGLLLGFIFQMIVAIAYPILGLDGYGIQGLWFASTDAIIVIVIIRLIGALFGIAL

SEQ ID NO: 1206 - protein, 147 aa, Listeria monocytogenes
LLPITLEQIELDVEVESPVDAIRAAGNLLVKTESASSDYVDAMVASYEKLGPYIVLAPHIAIPHARPEHGVKKQCMSIVRLKKPIKFGHPANDDVSLVIAIGGVDTNFHIKMLQALSELLTDEDKLKRLKTSTDKAEILCTINKEEK

SEQ ID NO: 1207 - protein, 249 aa, Listeria monocytogenes
MKKLNKSSSTPLYMQLKNQLQEKIEQDMSVGDLLLTETEIEKMYDVSRMTVRKAIEELVNEGIVSKQQGKGTFVSQTKTTQGLGRIFSWSEEMKLQHKESKTISVEISAAIPSKKIRTALQLGKHEEVTCIRRVREIDGEPVAIMINYLRAKYVPGLLENGLKSDSLYHDLEEIYHISLVHADEIITARLSTPIESALLAVPEDSAVLHVRRTSYMKGNTPVEVVDMVARGDRYQYLAELEGRTKKHII

SEQ ID NO: 1208 - protein, 356 aa, Listeria monocytogenes
MDTSRKIIHIDMDAFYASVEQRDHPEFRGKPLIIGGDPNKRGVVATCSYEARKFGVHSAMPTRQAAKLCPNGIFIHGNMAHYVEVSNQIREIFSRYTDIIEPLSLDEAYLDVTENKKGMKSATMVAREIQQTIYQELGLTASAGVSFNKFIAKIASDFKKPAGITVVTPEEAEAFLEQIPVTKFYGVGKVTAEKLHRLGIETGADLKKWSEWDLIRELHKHGYHLYRHVRGRSNNIVNPHRDRKSVGKETTFEFNVLDSRVLEQSLMQFAKKVEERLIKLQKHGKTVVLKLRYSDFTTITKRLTLNEYTNDASQIYQAAALLLIESYTGQDSIRLIGLTVTNLKPVYFENLRLEGL

SEQ ID NO: 1209 - protein, 263 aa, Listeria monocytogenes
MNPFLKNKTVLITGASNGLGAEIARQVAMSGGNVIITARSTKKLIELQKDIHDKFSVEATYFTLDMTDFEQVKQVSAEINASYQIDVLVNCAGFGLFENAIDIPFETIEKMFDTNVLGLIQLTQLILPQMQARKAGHIINIASQAAKIATPKSTVYSATKYAVLGFSNALRLELMPDKINVTTINPGPIATNFFDVADKSSNYLETVGKLVLKPEKVAHKTVQIMGTKRREINLPFVMNIATRLYQVMPQVIEFFGKGAFLKK

SEQ ID NO: 1210 - protein, 306 aa, Listeria monocytogenes
MELVFLGTGAGVPSRGRNVTSIALSMLNERNTIWLFDCGEATQHQIMRSQIKLSKLEKIFITHMHGDHIFGLPGLLSSRSFQGGDSNLTIYGPAGIAEYVETSLRLSGTRLTYKINFEEIEPGVIFEDKMFIVTADDLDHGVRSFGYRIVEKDKQGALNAEKLKADGVEAGPVFQKLKNGEIVTLADGRVIDGKNYIGEPQKGKIISIFGDTRETSSELELALNADILVHEATFEGDKAKMAGEYMHSTTLQAAKLAKTANVKKLILTHISSRYDRDASKELLIEAKTIFENTEIAYDLAVFQVGE

SEQ ID NO: 1211 - protein, 491 aa, Listeria monocytogenes
MTDELEQKALITIFGGTGDLANRKLYPSLYHLYSKGSLGDNFAVIGTARREWSNDFFRDKVKESIKDIDGSEKDADAFASHFYYQSHDVTNKESYLTLKDLSDELDAKYELDGNRLFYLAMAPNFFGTIASRIKSEGFVDTDGFHRLIIEKPFGHDLASAEELNNSLRQAFKEDEIYRIDHYLGKEMIQNISVIRFANSIIESLWNNRYIDNIQVTLTEVLGVEDRGRYYDESGALRDMVQNHILQIVSLLAMEPPINLSTREIRHEKVRALRSLRVFEGKEVHQSFIRGQYGPGEVDGKELKGYRQEDNVDPHSNTETFVAAKLEIDNFRWAGVPFYIRTGKRLAKKTTQIAIQFKDVPLNLFGQQQSLGGNVLVIHIQPDEGITLHLNVKEPGQGMVTMPVNLNYIHSSPDGMNTPEAYEKLILDCLRGDATYFSHWDEVSLSWNFIDHIADVWTNTKDHFPNYKSGSMGPKEADDLIQRDGFQWFPID

SEQ ID NO: 1212 - protein, 312 aa, Listeria monocytogenes
MANASKSALTKQTGFQKWWTLLRPHTLVASFVPVFLGTSVAMSYTSFHFTRFIVMLIACFFIQTSANLFNEYFDYKKGQDDEHSVGNGGAIVRNGMRPGFILFLAIFLYILSILGGVYLSIELNWYVGLLGAICMLVGFLYTGGPYPIAYTPFGEIMAGFFMGGIITFISFYIQAEFISSFIVYVSIPVMVLVGNLLLANSIRDLVPDKKNGRLTLAILLGRKWATVLFAAAFLFSYVFEIALIFTQDAPWWTLLILLSLPEAIRAVRRFIGKTSPITMVPAMKSTSKALTIFGITLALAYLLSLLSRNLFM

SEQ ID NO: 1213 - protein, 617 aa, Listeria monocytogenes
VNLRKDLSEKVLIADGAMGTLLYSYGVDRSFEELNLSHPEDIVAIHKAYIGAGADIIQTNTYGANYIKLARYGLEDEVKRINQAAIRLAKEAARGTGTYIFGTIGGINGAVDARLPAAPLEEIKRSFREQLYCFLLDGVDAILLETYYDLDELKTVLKILRETTDLPVVANVSMHEPGILQNGKKLPDALEELIALGADVVGINCRLGPYHMARALETVPLYDNAYLAVYPNASLPEMQEGKVIYQSDTDYFEHYGEVFRQEGARIIGGCCGTTPDHIRALRKGLETTKPILEKEVRPILELVPEEVEDVDSGERLLDKVKERLTILVELDPPRTFDTTKFFEGAQALDEAGVDAITISDNSLATPRISNMALASILKHEYGIKPLIHLTTRDHNLVGMHSHVMGFHKLGLHDVLAITGDPTKVGDFPGASSVFDLRSVELVQLIKKFNDGISYTGKSLKEKARFHVGAAFNPNVLNLEKAVRLIERKVEYGADYIITQPIYDVNKAILLKEALQKANIDVPLFIGVMPLLSSRNAEFLHNEVPGIRLTDDVRERMREAEEHGHANEEGMAIARELVDAICEHFQGIYIITPFLRYDLSIELAKYAQNKQQVQIGSK

SEQ ID NO: 1214 - protein, 390 aa, Listeria monocytogenes
VAKEYAQDTAVIKASLGIDKETGALNTPIHLSSTFHQHDFDNYHAYDYARSGNPTREKVEQAIAELEGGTNGFAFASGMAAVSAALFTLSKGDHFIIAKDVYGGTFRLVEQVLPRFGITHTFVDTTNIDEVAKAFQANTKLVYLETPSNPLLHVTDIRTVAKLAKANGCYTFVDNTFLTPLIQKPLELGADLVIHSATKFLGGHSDILAGLIVTNNPNLAEAVYFLQNSTGGVLGVQDSWLLLRGLKTLSVRMKAGTETAEKIALFLNAEPDVVAVHYPGLPSHAGYDIQVEQATSGGAVLSFDLGSEEAVRELVTHLELPVFSVSLGAVESILSYPAKMSHAAVPEEERLAQGITPGLLRFSAGLEDAEDLIADLKQALSFIKKGSVAK

SEQ ID NO: 1215 - protein, 374 aa, Listeria monocytogenes
MAKLKQETIAAQIGNRKCERTGAVNMPVYFSTAYQHADLGVSTGYDYTRTGNPTRDALQEALAELENGTHAFATSSGMSAIQLVFQLFKTGEHIISSQDLYGGTFRYFEQFGAQYQIGFSYWDGAEIADLEKLIRPETKAIFIETPTNPLMQETDIATVAKWAHAHDLLVIVDNTFYTPVLQQPLSLGADIVIHSATKYLGGHNDVLAGAVIVKEEKLGKFFFDQLNATGTVLSPFDSWLLIRGLKTLVLRVRQHQANAQKIAAFLEEHKLVEEVRYPGRGGMISFFIRDAALVSPLLKELELFTFAESLGGVESLITYPTTQTHADIPVELRNSYGLTDKLLRISVGIEASEDLIADLSKALDAVLEEVSARG

SEQ ID NO: 1216 - protein, 468 aa, Listeria monocytogenes
VDKLFLARFQFASTTIFHFLFVPLSIGLVFMVALMETLYVVKGKEIYKKMSKFWGHIFLINFAVGVVTGIIQEFQFGMNWSDYSRFVGDVFGAPLAIEALLAFFMESTFIGLWIFGWDKLGKKLHLACIWLVSIGTIMSSFWILAANSFMQHPVGFEFKNGRAEMNDFLQLITNGQLLVEFPHVIFGAFATGAFFIAGVSAYKMLKKQDVAFFKRSFQIAMVMAVIGGFGVAFSGHSQAQYLVKTQPMKMAATEGIWEDTADPAPWTMIAKINPEEKKNEWEVNVPYALSFLSYGTLTGSVEGMNTLQKQYEEKYGEGDYIPPVKTAFWSFRIMVGAGMLMILFALIGIVLAWKKKLVNAKWYLRFMIPMIGFPFLANSMGWIMTEIGRQPWVVFGYMKTADAVSPNVSSGQILFSIIAFSTIYTILAILLVYLFIREIKKGPDGHKPEKAEISVDPFDKGDESFVTK

SEQ ID NO: 1217 - protein, 765 aa, Listeria monocytogenes
MVKAISSNLGYPRLGEKREWKRALEKFWNGAISEEELLAETKALRLHALKKQQEKGIDLIPVGDFSFYDQVLDTSVTFGIIPKRFQHDGGKVSLNTYFDIARGKSDAVASEMTKWFNTNYHYIVPELADADPKVLDNRALYYYEEAKKELGIEGKPVLVGPVTYLKLGKGNDAENFEALLDKFIPAYVEILKELERAGAKWVQIDEPYLATSFDKSEIKLFEKVYQAFQTAVPNLKIELQTYFESLDYYEEVVNLPVAAIGIDFVHDHGDSLEALKAHGFPEDKYLAAGVIDGRNVWRSDLDAKLSLLTEIADYVTDGKLIVQPSNSLLHVPVTKLSEPDLDEVILGGLSFADQKLDEIAILTKALTDGAESVTAELEDARAAVTALNESSHRNNLEVQEAIANLGNVRVDRELPFAERIKLQHAWLNLPLFPTTTIGSFPQSPEVRKTRADWLKGNITDAEYNAFIEKETARWIKIQEELDIDVLVHGEFERTDMVEYFGQKLAGFQATKFGWVQSYGSRAVRPPLIYGDVAFTEEITVKESVYAQSLTKRPVKGMLTAPVTIINWSFVRDDVPESVVANQVGLALRKEVEALERNGIKVIQVDEPALREGLPLKQARWEKYLNDAVYSFKLTTASVQNDTQIHTHMCYSDFDDIIDTISALDADVISIETSRSHGEIISTFEEVTYDKEIGLGVYDIHSPRVPTVTEIQDNIRRALRAIDAKQFWINPDCGLKTRKEPETIAALQDMIKATKEVRAEYQVLEK

SEQ ID NO: 1218 - protein, 885 aa, Listeria monocytogenes
MTRKKAHIISHSHWDREWFLPLESLRFRLVTLMDEVEALLDKEDGFHHFHMDGQMIMLEDYLAVKPAKKEKMKQLVADGKLRIGPWYMLQDAFLTSGEANIRNLQYGLEMAEEFGQAEKIGYFPDTFGLYGQVPQLMRQAGFDTVVFGRGVNPTGFNNQVFDSAFASKYSEMFWESPDGSKVLGILLANWYSNGNEIPVDKEAAKVFWDKKLADVERFASTDEWLFMNGCDHQPVQTDLAEALEVARELYPDVKFIHSHFEKYQEAVKAGLEPGKLQTVHGELTSQQSDGWSTLANTASSRIYLKQANAKIERLLERLAEPISVMGTEAGVQYPHEYLAYAWKLLMENQIHDSITGCSLDEVHREMEARFEKVEQTTMAIIQNAARRITEQIATNETGIPLTVFHAGGIEATRTVELEIETDAIHFSEMHFELIPDELAKLPEQSFRLETSTGEEIPVVVESLGIRFNYDLPERKFRDSYFARKYKLTFAVENLPAVGYETIYAHSVDLVNESANQTQDFSLENRFLKVEVAANGTYTILDKETSVEVSGVGAYEDVGDIGNEYMFKETGDNLRINTLNSKPAIRVLREDKLGKTIEINHEIEIPESASATFAEEKRRLVWHPDRQSERSENFTTFKITTELTLNKHDKQLTIRVKLNNNVDDHRLRVLFPTGKQTETHQAGSVFEVVTRANKQVKEWTNPAKDNRKQGFVASGNIVVASLGLPEYEVSEHGDKLELTLLRAVSEIGDWGDFPAYEAECHREITAEFHLFLTDDSDVANSSIPVQVNARLTPIFAFQHKSATKEKILAENRDFAEWETEDGFVFSAFKIAKDNQPIIRFYQTASEPKLLTTERPWQKSTILEETTGDAKKQFTASPNEIITLKGV

SEQ ID NO: 1219 - protein, 434 aa, Listeria monocytogenes
MTNKVPASFNKWIEKVKTTFPENEKLHRMFEKCFTNTYTTTLQETEEGLPFVITGDIPAMWLRDSTSQIRPYLIVAEEDEEMATVIENLVKLQTKCILHDPYANAFNKSANGAGFQNDKTAMTNLVWERKYEIDSLCYPIQLAYLLWKSTNRTGHFTEEFRKALHQIIEVFKIEQKHTEQSPYRFERENVRQSDTLNNNGKGTDVSYTGMSWSGFRPSDDACMYGYLVPSNMFLVVVMDYVQEIAATFYPEDKELPKESSDLRKEVAAGIETYAKQVHPYYGDVYAYEVDGTGRKLFMDDANVPSLLAATYLGFCEKTDPAYQATRKLILSRENPYFVEGSVLTGIGSPHTPDHYVWPIALSIEGLTAETEAEKQAILEMLIAGDGGTDYMHEGVNASNPAEFTRDWFAWSNAMFSEFVLSLCGVYVKGSPLSK

SEQ ID NO: 1220 - protein, 203 aa, Listeria monocytogenes
MKLIDKFSVISDWIIRLVWTNLVWLFLVLIGGIVFGFMPATVALFTITRKWARGDLDTPVWKSAWQTYKQVFVSANLAGGVFALIGIFLYADLRIVFELMQGFWSTILYFFLMFLLFLVGIAFLQYFTVFVHFQMKNVRAYVGQAFLLAITSFKNTFMIVIGLVFCAWLISKMPAFILFISGVLPSYWIMKINLHRFKQMEPK

SEQ ID NO: 1221 - protein, 579 aa, Listeria monocytogenes
MSMAQELPRKRVFKRMLLIFSLTSLFTVSLLLFFIYKYYTNIQLDTNLQRAETIANKQLDALTEKQKALISLTQDIYRNSDLMQDVQIAMTNDYGSYTEQNIDNYFKSKNFYSVDMQTYLQSYFSYDEDIIALQLISDDGSYSYTFPSRYREWKETVDTYGEENIATEASKQGTFYTIENKIVVKQPINDPSTLKQMGYLLLYIDPTFLSKWVTKDYQNSIFQINNAKGAELYSNHPTKQIQTPEKQGWINVDNKKIYFQKTEDETSGLKNNTFLYRVTDDSAPLIELTLFGIGLLLVIFSISINFVISRRYSKRILTIIGGMNRVEKGTLDAKLPVDNNGDELTMISERFNHMTENLDAYVKKVYSLEMEEQKARLKALQGQMQPHFLYNSLEAIRMNARVEGAKATSDMIYQLATLLRYTANHREITTLGEEINYVKQYVRFMEMRHEQPIKLEINIEKRFNHTQIPRFALQPLIENFFKYAYKENQNPIVVITVTAENNNLQFRIEDNGSGIDAEKLKEVQATIESKDDTSHIGLANLNKRLQLLYGETYRLTIKSKANEGTIILFQVPQNTGGEK

SEQ ID NO: 1222 - protein, 494 aa, Listeria monocytogenes
MLKIVLVDDEPLILKGLESIIPEFEQSIEIIGTAKNGAVALDLFANQEVDVLLTDIEMPVMNGLELIDEWKKRQPATKTIVLSGFEDFHYVKRGLSAGIENYLLKPLNEQELKETLIQIEKKQMTDSVIPREEAYYILRDNTIWRWLNLRINKEEWEERLALYDMALNPKENAVLIQIQATKEIDLAEWKNLSEQYRKDFSFMLLTPENEIIVGITEQTSISEQILAIHQDMKKRISNEAFYLFISEKVQGEMMYPQAFRQLTRLLPERLVQEPGSLIAYQKRTKHTWRPKRKQHQLAKLLVMNNEKEIKAWINNFFKEWNDHKLESDPHQMLHILNELLVMMAESDPKELSESMGRIAEETSIEGLEEATLAYAIRYYNRKKQTDESKSPIIQNVLSYITEHFAEGMSLKTLGNDFHINAVYLGQLFQKEMGEHFTDYLNRYRVNYAKEELLQTKDNLTIIAGKSGYTDMAYFYRQFKKHTGETPNRYRKIHQ

SEQ ID NO: 1223 - protein, 309 aa, Listeria monocytogenes
LKKVLSQIRANRIWLLMVLPGVLWFLVFSYLPMFGTVIAFKDYKIDGKGFLSSIMSSDWVGLENFKFLFQTNDAFIITRNTVLYNLVFIIVGLFLGVALAIIFNSLLNKRGAKIYQTGMLFPHFLSWVVVSYFLFSFLSEDSGLMNNILLAFGQDPVSWYNDPKYWPFILIMMNVWKGLGYGSIVYLAAIAGIDRTYYEAAMIDGAGKWQQIRHVTIPALTPLMVILTILNVGKIFNSDFGLFYQLPRNSGPLYPVTDVIDTYVYRGLTSLGDMSMSAAAGFYQSIVGFILVLLTNYIVKKINPEYGLF

SEQ ID NO: 1224 - protein, 323 aa, Listeria monocytogenes
LAEQLEAVSEIEQVRGEMEKPAKNKPAKDIIGFGKKMNVAMNIMLAFLALICIFPFLYIIVISFSSESSLAANGFQLIPKEWSMEAYEYLWKMKGQLLQSYGITILVTVIGTVCSVAMIALYSYAISRPQFKYRRQFTFIAFFTMLFSGGMVPAYIVMTQFLHLRNSIWAMILPLAMNAFYIMIMRTFFLRSIPEPILEAARIEGAGELRIFLQMVVPLSLPGLATIALFSTLGYWNDWFQASLYIDNPNLVPLQSLLMKIENNLEFMRQNSEIAYTAGAFKSIPQDGAKMAMVVISTLPIAITYPFFQKYFISGLTIGGVKE

SEQ ID NO: 1225 - protein, 485 aa, Listeria monocytogenes
MKKKWGVIIASLCLLLGLSACGSDEKADANEVPTLKWYMIGTPQKDTEEVMKEVNKYTEEKIGVKVEMTQIDWGDYGKRMQTVINSGENFDIAYSAAGEFVSYSQKGAFLPLNKYLDKEGKKMKAELNDVLWEGATIDGNIYGVPSNKEVGEQQVYVFNKNLVDKYKMDVTKVKNFSDLEPMLKTIKENEPSITPIGGNKDFKPAFPYDYLIDNAVPLPFAVNQYEDTGKIVNFYEQPETLDILKSLHSFYQKGYVTKDIATSTDPWSYDKENWFVRIEKYQPYAENIWDKNTGGKYKVVTQPIAETPIIKNNSVTGAIQAVSVTSQHPEEAVKFLDLLNTDEYLRNLVDKGIEGTHYKELDDGKIQDLPARVERYSMPTYALGNHFILKLYEDEPADKWDQFKEFNKKSVASPGLGFYFDSSKVRTEIASITNVCNEFAPALLTGTVDPVEYTEKFKAKLNDAGMKKVMKEMQKQYDEYRASQE

SEQ ID NO: 1226 - protein, 156 aa, Listeria monocytogenes
MERAFFMQQALEEAEKARDIGEVPIGAVVVLDGEIIGRAHNLRETSQNAVTHAELLAIQDACKHQNSWRLSGAELYVTLEPCPMCSGAILLSRIEKVYYGAKDPKAGTAGSLMNLLQDDRFNHTCEVEAGLMESESSEMLKSFFQELRKRNKSNRS

SEQ ID NO: 1227 - protein, 565 aa, Listeria monocytogenes
MAKLEKDQEKVITQGKSGADLVVDSLINQGVTHVFGIPGAKIDKVFDVMEERGPELIVSRHEQNAAFMAAAIGRLTGKPGVVLVTSGPGASNLATGLVTATAEGDPVVAIAGNVTRQDRLKRTHQSMDNAALFRPITKYSEEVVHAESIPEAITNAFRSATEPNQGAAFVSLPQDIVNEPNVPVKAIRPLAKPENGPASKEQVAKLVTRLKKAKLPVLLLGMRASSPEVTGAIRRLLQKTSIPVVETFQAAGVISRDLEDNFFGRVGLFRNQPGDILLNKADLVITVGYDPIEYDPKAWNASGDRTIVHLDDIRADIDHYYQPVTELVGNIALTLDRVNAKFSGLELAEKELETLKELHAQLEERDVPPESDETNRVHPLSVIQTLRSAIDDNVTVTVDVGSHYIWMARHFRSYEPRRLLFSNGMQTLGVALPWGIAATLVHPGEKVVSISGDGGFLFSAMELETAVRLRAPLVHLVWNDGSYDMVAFQQKMKYGKEAAVRFGDVDIVKFAESFGAKGLRVTNPAELSDVLKEALETEGPVVVDIPIDYRDNIKLGETLLPDQFY

SEQ ID NO: 1228 - protein, 331 aa, Listeria monocytogenes
MKYVKFGNTGMDVSKICLGTMGFGDKDKWIHKWVLDEANSRPIIKKALDLGINFFDTANIYSYGESEKIVGRALKDYANRDDIVLATKVQQTMRPDRPNSGGLSRKTILSEIDHSLKRLETDYVDLYIIHRFDENTPIEETMEALHDVVKSGKARYIGASAMYAWQFQKAQRVAERNGWTKFVSMQNHYNMIYREEEREMIPFCRDEKIAITPYSPLASGRLTRDLNETTDRSETDPVQKSKYDDMMNADKGIIERVAELAETHQVSRDKIALAWLLNKDEITSPIIGAQKESHLESAVEALNIKLTTSEVNYLEELYIPHPVVGALPTTK

SEQ ID NO: 1229 - protein, 266 aa, Listeria monocytogenes
LDVESSPLMQKIDYSTRKKIDLVNNSILRYIVRAMLACLFLTLGTAVAVMIGDKVDHFAPGLGKITYAFMFSWSLVMIIYMNAELGTSNMMYMTTGVYQKIVKPGKALQILLLCIVCNLLGGILAGYLVSLTSVFHNLPADHFLFTAVSGKLEKAPLQIFVEGIFANIVVNTAVLCTLRMKDDAGKVIAMIFIIFIFAFLGFEHVIANFSSFSLAFFASGGTLAAMTAGNVTVNLVLALLGNFVGGGLVIGLGYAWLNRTKSIYKD

SEQ ID NO: 1230 - protein, 180 aa, Listeria monocytogenes
MKKEKTVLIMNFDEESISYQAFSEMKRLHQERKIIGYQMAVVKHEPGNKLVAQDFLDFTGADKNMKDSLIGMLIGILGGPFGILIGWMVGAIVGSMRDAGEVKDALTVFERTLKTIPEGSTGVILIATEQELANVNDVAMDELHGRVQRMDEAIVAQEIKSAQETEGKAKDSAKKHWFSK

SEQ ID NO: 1231 - protein, 256 aa, Listeria monocytogenes
MYWTVALALLVYFILWFIISKIKGKYSLVDIAWGGGFVVVAWTGFLTTFSVTTQSITILILVTLWGVRLFWHLARRNWNKPEDYRYVNMRKRWGTTLVNLKAFLNVFVLQGVLLFIIALPITHSFANETATFAWWQILGIVIWIIGFIFEVGGDLQLENFKKNPANKGKLLTSGFWSVTRHPNYFGEALSWWGVFLVALTQLTDLWLITSPIVITLLLLFVSGVPLLEKKYQDRADFQAYANKTSKFFPFIGKKGL

SEQ ID NO: 1232 - protein, 588 aa, Listeria monocytogenes
MESESKRLLQSMLNGAAEVISKKDELNRINVFPVADGDTGSNLASLMQAIIDHVSPREYSTKELLEEVASAALIGARGNSGMIFAQYLNAVAESYHHIESTFDGLVIAFQKAVHKAYEALLDPKEGTILSVMKAWSEELAGTYEQERSFQQSLLNAQIVAEKALINTEFQMPILRKNRLVDSGAKGFYYFIAGLTNAYCGKAVSATVRFMEVEQTAEHMHVETSEPKYRYCSEFIIKQATISHQHLQEILASKGDSLVIAGNEKQIKIHIHTNEPKEVLSLMAAYGMMTYQKVDDMRLQYEVTKKPRAKIAIVTDSIADLPEAFLLEHQVHVLPMNILAGDENFLDKLTVGPDMMQEKLRKQTKMSTAQPTIRTVDALLSFLENKYEHVLVISVAAKLSGTYQLIKQRIKVRELSSDWIRVIDSKLNSVAQGILVKQAVELVESGKSWESIYPEVEQMIERTFIYVAVADLSPMVQSGRIPRVLGKLAQKLSLYPIVSLDESGDGKLIGVSFSQKQSMKKIIKKIAKLQLKELAITHVSSRDNAAIWQKQLEKETGKISYLVDSSAAIAISAGLGSVAVAGIKKEETI

SEQ ID NO: 1233 - protein, 137 aa, Listeria monocytogenes
MAQFLKLFLTSAVVFLVFDLFWLLVASKKMYQQFIGDLMGDVRLAPAVIFYFIYVVGVTFFVLLPGTEKGSLGYTILAGALFGLVCYATYDLTNLATLKDWPITMTIIDLVWGTAVTTVTSVIVYFINLHFFSGAGS

SEQ ID NO: 1234 - protein, 467 aa, Listeria monocytogenes
MTSVMWFRRDLRVNDNKALYHACKEDDLLLLFQVNPAQFITGSPSHQAFFASVAHFKQEVDKTALLQIMFGEPVECLKQLKETLPSWDKVYFNRDETGYGAERDEAAKTFFDEQEIEVQAFHDSYLHSAEEVKKSPTEYYKIFTPYYKKWREEIKETPFKVTLKADNIRKENLFPKYEEQFAEMTCDLPILDSGEKTANTRLANFIKHDVADYDKARDFPELDKTSHLSRYLRTGEISVRTIWQALQENEATEGRAIFEKELCWRDFYNMIYVSFPNQKNEPIQENYRFIEWENNREFFKAWQEGKTGFPLVDAAMRQLKETGWMHNRLRMVTASFLTKDLLIDWRFGEKYFQQMLIDYDPASNIGGWQWAASTGTDAVPYFRIFNPTTQSQKFDPTGKFIRKYVKELANLPDKFIHQPEKMSEIEQKEYGLLLGKDYPFPLIDHKERRKLAIARYEFSKEHYRGNI

SEQ ID NO: 1235 - protein, 821 aa, Listeria monocytogenes
VAFKKLILVLTMAALFLGLKIVVAAENEPTDLASNEAIVTNFADLKTAISEDNGIDTVYLGADVELSGGIIIPATKKTFTLSGKNPATGEIHTLTETMASAGAQSSVITVNTNTGAKETTLKDINVVGKNYYGTISVYGAAKNVVQNYENVHYQGPQMIYNLNGTANFKGTNDITIASVVSGSAAPNEVAEIKGVSASGKLTINHASSNANSAFWFGGGTAEVNTFTVEENADVTIISNGTGMFYRSGTKPVDIDVKKNAKLDITSNNNIFRDTPGGAVKIAEGADVTMTKTAGGNPLLWVADDITVSPDARFILNKTGGTGYIIQFYNATAKLDINDPRSFLIATNSNTPMFYWPYANTFNLSAQMVNYWDTAGTIDRTDLAAQSFSLPNGENVTGSLTYTGTTTKILSTNAGMTPTNFNQNTARMIAMGRLEGTINPVTDADNEITGTATPNAFINISYTENGGNKVLEGQSNDAGTYRIAIPNGFIKPYIKLTTTIKQDQKRITLDDVTVEDVTPPSGDAVTQIIQLGDPFPDVAELVTNIYDHSDNTSGAGVTTTLQSAPDTNVFGPAEAIVRLEDKAHNHVDIRVPVFIKDDATEIQDGKALRAADFSVNVKDINELNDAELEQFILTKSGAKAFQIETGEDLTTDVKVASTNLKKETGTYTATIQIGGLTKEIAIQVTGELKFNHVPETISFETMGLNQQKNIAKRNADFDLSVLDSRGAGDNFSVTAAIKAPLTSTANSAHTLPNGLIFIDNAGEKKILSDEPITIFQSQSASDMIVPIEWAEDRGILVEVDAAEAYVDESYETTIEWTLTVAP

SEQ ID NO: 1236 - protein, 341 aa, Listeria monocytogenes
LKKSFLSLLFIIPLLVTCGNFTEAQAAEGDVGYSVQAHIPANQIDKRQTYFDLKMQPKQKQTVEIDVLNSSNEEIQVEAAINYASTNRTGVIDYTKNDLTKKDKSLKYPLPELAEIPDDQKRLTIPVNGKKTVQVMIEMPAEKVDGVVLGAVEFKKKNTNETKKTKGVSLKNEYSYIVGMQLSETDKQVKPHMNLLSIKPALINYHTAIVAKLQNDQPVILENLSIDAKAYQQNSNKLLYQTKKTDMKMAPNSNFDFGIDWENQPLKEGKYRLKMTATNGVETWTWDEAFTIGKEGQNLNKEAVNLEKTNTWLYVAIAAGVVLIALIIILVIRKRRNKQEK

SEQ ID NO: 1237 - protein, 237 aa, Listeria monocytogenes
MIFKKTLIVGLIGISSVTLFAPSAFAVTSEGDSKATVKFKAGTGVVDPVDPENPTKPIDPLDPSNPTDPGTGNTGSLTLDYVSSVNFGEHEVSSTEQSYSSTSRKPFIQISDRRGTGAGWKVTATATAFQNEDGAASLSGATLSFKNGETASASTTATTPTAAQTVELPTDGTSIVSVVSAKESEGMGTWINRWFGATPNDTASLNDNVKLTIPAGSATLGDHEATITWTLSDAPGV

SEQ ID NO: 1238 - protein, 288 aa, Listeria monocytogenes
MIKVIASDMDGTLLNSDIEIAQENVEAIEKARAKGIHFVLCTGRMYDDAMGLINKANLYAPAICMNGAEIRDEHGKIILQHPIDRNLARNTYNTLTELGMYTEFFTDMGPITTDKARGKEFMIEMHKRIHPDVPAETIMDKVEERFESKDVHEIPDVERILGNKDLTILKFISFSSDKDILAKAKQKLEKDSELSVTSSFSDNIEITHREAQKGISLQYYVEKLGVTLDETFAIGDNMNDISMLKMAGYSVAMGNGEEEVKDLAEHVTLSNDEHGVAAAIYKMLETND

SEQ ID NO: 1239 - protein, 271 aa, Listeria monocytogenes
MTIKKTLTIAGSDSSGGAGLQADLKTFEEYGTYGFSAITTIVTMDPDNNWAHGVTPIDAQLVREQLKTILSGGPVDAMKTGMLGSIEIIKATREAIDKYDLKNVVIDPVMVCKGEDELIQPENAEAIRDLLLPKATITTPNLFEAGQLSGLGKLTTLDDMKAAAKKIIELGAKYVVIKGGKALESDKAIDLLYDGKEFTIYEVEKISPSHNHGAGCTFAAAITAGLAKGLTVEEAVAKAKDFVTAAIKGGFALNEFIGPVWHGAYNKAENR

SEQ ID NO: 1240 - protein, 102 aa, Listeria monocytogenes
MKVSKSFEVFAKEAPEVHSAWMETVHKLDAASKLDKKTEELAYIAVMAATRLESGLPFHVKMAKSNGATRDEIISAILVGLPAVGNTVISALPIALDAFDEE

SEQ ID NO: 1241 - protein, 94 aa, Listeria monocytogenes
MAKAKYEENFKKSLVALYRRGKTKHSICQEFNVPHSTFGKWIKKFNNEENIESNEILNILQAQELKKQRVLLEEELSILTEAIAVFENPLPKNK

SEQ ID NO: 1242 - protein, 298 aa, Listeria monocytogenes
MIGYGKTVRDIRTSKGIHQKDLYDNIISKSFAIEFEKGKHDITLSLFEKILKRMNMDLDEFFYIHRELSKSAEKNYLCMNQERGNIYDLESLELLYSELSKHDGELVEVWKAFVRSRIKMVEHLLKYHEFTVDVITAKDKCTIQKYLFSIDTWTLEELKICANSIYFFEEDLQIQFLNQVIKAIQPYKNYDRARRVLCTLLINTIEVFISRSQLSSASKLLILLDSLCIYNESAFYRNISNFLKGLLKMQSNQIKEGYAQAKKAIQLMNDLHFEEIAYLYEILLDQFIQLEGIDILNY

SEQ ID NO: 1243 - protein, 211 aa, Listeria monocytogenes
VNVDEQKVRVLNNLVEHYGYQDWWEADNRLADWLSMILIQRTIEKNAKQALANLGPHLDLESLIGMDMATLEEYIYPAGFYKQKSIYIKALIKWFHGHGASLDKFQTYSTEDLRKELLGIKGVGEETADAMLLYIFERNVFIADLYARRLFSRLGFGEYKTYEQMREEFMPITENIPHKLCKEWHSVIDVHGKHFGKDKAMDESWLLEFSN

SEQ ID NO: 1244 - protein, 138 aa, Listeria monocytogenes
MSIIARELTKAEEAEIIRLKEEGEVMLQTDGTPEERIEKITEYLKNTSPDPDLAEELGYILGSLYGEAVREKYGWRWLFVSENDLEGYAVTSKEHGYTFMVHDYFMQVIVQNKPDNSKMLFELMVDMTGNRNDFRMIG

SEQ ID NO: 1245 - protein, 187 aa, Listeria monocytogenes
MEQNKEKLTKPTSEKNYFWPIMIISFVAVVVILLLFFSPIGYQGAVHFDITIFPRMNAIFNSFTFVFLVIALWAIIKKKNIKMHRGFILAAFTSTLFFLVSYLTFHYLSAETSTFGGTGIIRPIYFFILITHSFLAAIVVPLALFALVWGWTMQIEKHKKIVRWTMPIWLYVSLTGVLVYLFMAPYY

SEQ ID NO: 1246 - protein, 235 aa, Listeria monocytogenes
MKPIFAVGDVHGEITLLDELLENWDKERERLLFVGDLIDRGENPAAVLRRVKALADQTGAIVLKGNHEQMLLDFLENPSGKMHYYLSQGGMETIQSLIADSLDKKMTPEGLAKRVKEEASELIDFIRKLPLYYEEGKYVFVHAGVDLTKKDWHDTEERDFFWIREPFLFGQNKTGKVFIFGHTPVQNLHIDESSGIWVSEDKTRLDIDGGAVFGGELHGVVVEEKVITKSFSVKK

SEQ ID NO: 1247 - protein, 525 aa, Listeria monocytogenes
MNSENLIAPELYNITDEIAKFSSEKTALIWKNEHGETKTWSYHHLLEQANKFANVAKDAGIKKGDHVIVMTPRLLETYAIYMGLWKAGAIIIPASELLKAHDLEYRIHHANVKAIVSYNGMTAEFDKIESIPSVSKKIIVGDKLSGWEQYETLMEAAPTEFERVETSRDDACLLAFTSGTTGNPKGVVHIHGWGYAHIRIAADHWLDIHEDDIVWATAGPGWQKWVWSPFLSVLGKGATGFIYNGRFIPEKQLHLLEEEKINVLCCTPTEYRLMAKVNNLREHDLSSLRSAVSAGEPLNREVIQVFRDNFDIKVRDGYGQTESTLLIGTLVDTPIRPGSMGKPIMPEYMAIIDADGNPVGVGEIGDIAMRRDFPALFKEYYKEPERLQKAIRGDYFVSGDRAIRDEDNYYWFQGRNDDIIISSGYTIGPFEVEDALTHHPAVKEVAVVASPDEIRGTVVKAFIVVKDGYKGTDDLVHELQTFTKEQTAPYKYPRRIEFVEALPKTDSGKIRRVELRDAEFASVHG

SEQ ID NO: 1248 - protein, 306 aa, Listeria monocytogenes
MTISQVKQTAKESLRGNWGIAIGIFVLAWLIETVGGGVLGWIPVVGWIALFLLTGPLYTGVAWVYLAISRREQPDVAYMFSGFKQFGRTFLAYLLISIFTFLWSLLLIVPGIIKTYSYSQTFFILRDNPNISALDAITESRHMMNGHKGRLFGLSLTFLLWYLIPLAVAIAGTVIVAGGMATTSYTADPAEVISALAAGATFGGLVLILASWLITLGISLYVYPYLITSIAVFYDDLYAATEGTFTEETVIVEEEVNPFGATEADPFAEDTHPEGFGPDAAKEPETPVVPEAPETPEAPKDNNEPK

SEQ ID NO: 1249 - protein, 178 aa, Listeria monocytogenes
MNQNKITAGGLEFLVRFALPTDRLKINGLMMDTARWLKESGSTQWSDILHGFDVHNIEQRIELGEVALFETEAGKLAGTMIIRKTPSDWDTDLWDNLAIDKAYYLHRIMVSREFSGISLSKQMIYFAEKLGIEMSVPFIRLDCIESNKTLNQMYLRYGFQFLGTKNGFHLYQKKLPQK

SEQ ID NO: 1250 - protein, 215 aa, Listeria monocytogenes
VANKFKTLDKMVYNLLLEKIKNGELVPNEHLAEEKLAREFGVSRSPLRKAIATLTAQGIVSYHENSGAVLNDCIVDADRYVQLMETIEIFVDAAIAKAAHFGYEMDLEKLYARMQEMERFSYLTDLENYFDAHHRFILCLISFAENPYQVRIVKQIFFQMVHFSDGINMFKSVEIREWTNKKSNQIYELLAEGKIELARKTIKSMFAELTIQAYR

SEQ ID NO: 1251 - protein, 896 aa, Listeria monocytogenes
MRKVYEIFILDWRRLFKAPLALLLVIALIILPSLYAWFNIEALWDPYSNTSGIKVAVSIDDEGAEIDVPGKKPQQVNVGNQLKKTLEKNKKLGWTFVSEDEAKKGVKSGKYYASIHIPKDFSEDMVSVVNDNVTKPTIDYSVNEKINAIAPKMTESGATTIVNQISSEFVGTVSKAVLEEFNKAGIDLENELPTIRRLKTKVFQVQDALPELKKMGAEAVKIEAKLPELKAKANQVVELNEKIPELNKATENVLLVEQQLPKIDQLGQDILVLQKKIPEIKQIAESVKEVDENFGTIKKTVNDAVNESGKALDVIDTAMAAIPTVEKIAQNGSGYVDKVSDFADEINKSFDTLAPAIKQNLTLMKQMADNIYQVTEAIKNGSITPEQAITELKKMEQDIDSLQQMITKQTATLESLNETLPNKPFTDLIANLKTINSQLGAQKETITKVRTELENGAQPSEELLNQLNEQAKNVSEKLDQILANYDSEIVPAIKVGLNQIQGDLKDSQKLLETLQAKIPEITQVLKDSRETLQTGQTYLEEFQERLPEIQKTLDEATKVINTKLDTIIAGINEAANFYQNDYPNVKANIKKAANFIRDDLPGLEKEINQASGLIQEKMPEFEKAIKIAADLSREELPEFEKAINNAANKITDFDKNYDLQSIIKMLRNDADKDSSFIASPVKLKETSYYPIPNYGSASSPFYTALCLWVGALLLISLLRVDVEVPAGIFSHYHRYFGRLLTFLSIGLMQALIVTLGNIFLLGVSIAEPLLHVLFSMFISVVFMTIVYTLVSLFNNVGKGIAIILLVLQISGAGGNFPIQVSPPFFQAIYPFLPFTYAVSLIRESVGGLYMPTVWIDMSVLAGFAILFITLGILLKKPLDKVVPKLSEKAKRSKLIH

SEQ ID NO: 1252 - protein, 213 aa, Listeria monocytogenes
MEKQTYEKLAYYTIKEKILSGKLHVGQHISEAGIAKELSISRTPVRKAIAVLVSEELIEYELNRGAIVIESSMSAGRFIELLEMAEILVVQTIEKCKNKNLTYKPEQGNALLEEMREIQKEEDVEAYLSLLSKWLLQFVAQLANSYAEDIVRKMKRDFFNKAQKDIKIIPVLLEEETMETLEQLTYYMVEKKHDLAKEVIQKLVNLYIIRTFR

SEQ ID NO: 1253 - protein, 239 aa, Listeria monocytogenes
MKIIVEKDYENMSKTTMQLLLGKMYQDKKVHLAITAGSTPKRMYELMVEEMKEKAPLKNVSYYNFDEIPIGDEKYGVTIANLKAMYFDPAGIPEEQIHMLDTKNYVEHEARLKEVGGLDAILIGIGEDGHFCGNLPGVTKFGDETRLVSVQSRPDMFDILLGEVGGDVEKVPEYYVTMGPKSVMHAKEVILFANGKKKAAIIKKALQGPVTEDIPSSIFQLHPNFTVVLDEEAASELNI

SEQ ID NO: 1254 - protein, 316 aa, Listeria monocytogenes
MIEFFKTTNEKMEQLSALEDGCWVKVTAPTDDEIEMLSKEMDVPKPYILDALDSEERSRIELKRAEQDVRHSLVIVDYPYESEDELGYAMYETLPIGIVLTRKHLVTITLRDLPILKDVQSMKLEEYDTTNHKQFLLKLLYAVSYYYLKYLNQIIKQTNNLEIQIKQSMKNEQLYAFMAVQKSLVFFATALQSNKAILDKMEDVEHFMQQEDNHDLLRDVIIENKQAIAMTDTYTQIISGMSDVFSSVISNNLNIVMKFLTSFTIILSLPTIVASIYGMNIKLPFMHNEHAFALILLFTLLITTGVTVIFWRRKYF

SEQ ID NO: 1255 - protein, 94 aa, Listeria monocytogenes
MEFMSMIVTGIVLAAIISGLSFVVGKLSGLSWFWIAFCANSGFFIIFITVQNSFPDNAAVALSYLNLGIGVVLIALTLFQSSNWLFKKTMQRKH

SEQ ID NO: 1256 - protein, 279 aa, Listeria monocytogenes
MAEISEELRLGEVVLNVGHLKEMAGFYQEVIGLKLLEENERMVRLGVSGSDEALLVLKKIDNAVVPEVPRIGLFHTAFLLPTRESLADVLLHLAKSGYPIDGAGDHAYSEALYLHDIEGNGIEIYADRPKAEWMRDSDGNLPMVTEQVDVDSLLQIATDEPFTGMPNGTIIGHVHLQVADADKAEQFYKEALGMKLTTAIPSARFFAAGDYHHHIGSNVWAGRNLELLQENETGLAWFTIITPDKDAIITTLEEQGYDVKRFESTISVTDSNGIKIHFK

SEQ ID NO: 1257 - protein, 463 aa, Listeria monocytogenes
MNSLFRRKPIEDLMHNKSGSTHLKQTLGPLDLTLLGVGAIVGTGIFILPGTVAAKNAGPAIIFSFVIAAIVCAIAAMCYSEFASSVPVAGSAYTYGYVVFGELIGWLLGWALILEYGLAVASVASGWSSYLNALLSGFHISIPEAISGPFNPEVGTFINLPAIIIVLVIAFLLTLGIKESTRVNTIMVVIKVGVILLFLVVGVFYVKPDNWQPFMPFGISGVMNGAALVFFAYLGFDAVSSAAEEVKDPQRTMPIGIIGSLLICTVLYVAVSAVLTGMVPYTDLNVTDPVAYALQVINQDWVAGIVSLGAVVGMITVILVMSYGATRLIFAMGRDGLLPKVLAEINQKYQTPVKNTWIFAVIVAIISGLVPLDRLAELVNIGTLLAFMMVSIGIIFLRKNKDIQARGFKVPLYPVLPIVSFLLCAFLISRLSVHTWILCGIWFVIGLIVYFAYGRKHSELLKK

SEQ ID NO: 1258 - protein, 623 aa, Listeria monocytogenes
MRNLKDRVLNSLKGNKKDIKISVVVPTYNTELEGLKNLMASIDKQTMNPDEYELVFVDDGSTTDTYERLQEFAETRPNMTVKQIENSGWGSRPRNIATKMAKGEYILYLDHDDTVFPETFERVYNFGKENNLDVVSGKEVRTNGWSWGWKQFSENNPHAEEMGIECLLPMTPHKFYKREFLLENDITFDDGARVLWEDVYFNSKAFIHGAKVGILADYPTYYWIATGANNSSSFGRDPHEKWNQINKLFNFFKDNIKEQRDLDFMLTHWYRSRVLGILGQWLLKNNNERIDIEFNYAKKLAEELIPAYISENLDKNNQVKDYLLRQGDLDSLKKLAQIDAGITALSYVEDAYFKEDKLFFKTSTKMTYEDKEDFFIEKTADRMERILPEEIKSKLPKEFFDYSDDLAEFTYEPSIKGRNSRATWKIDGSTSNVEVVNKKANLYKIEGEMSFSVQINDYILDAADKKQPWDIATRFTGLGYTSHRALTIGKILIKTALINNKTMIVYKNASGLISLDVGSSVRSIVEDSGVKREQILIDKTSGKVTIPLNEIHVFGESLIEGNAELKPVGISDADPINVKAKLIGEANKARVEVLLGDEKLSGEYHLVTNIQGKKDKQQIKITL

SEQ ID NO: 1259 - protein, 288 aa, Listeria monocytogenes
MKGIILAGGSGTRLYPLTKAISKQMLPIYDKPMIYYPLSILMLAGIKDILIISTPEDTPRFEQLLADSDQLGINISYAVQEKPEGLAQAFIIAEDFIGDDSVSLILGDNIYYGQGLSKMLQRASAKKAGATVFGYHVNDPERFGVVEFDESMKAISIEEKPTEPKSNYAVTGLYFYDNRVVEIAKSIKPSERGELEITDVNKRYLELGELDVELMGRGFAWLDTGTHESLLEASTFIETIERRQNLKIACLEEIAYRMGYIDEAAVEKLAEPLKKNAYGQYLMKLINK

SEQ ID NO: 1260 - protein, 186 aa, Listeria monocytogenes
MEIVESKLAGVKLVKPKVFGDHRGFFMESYNEKAFHEAGIDMKFIQDNHSLSVEAGVLRGMHYQTNPKAQTKLIRVATGAIYDVVVDMRKGSPTYGEWEGYILSEANKHQLLVPQGFAHGFCTITENVNVLYKVDQLYSPENDAGIAYDDPDLNITWPTDKLILSDKDTKHPRLKDAENNFVWENK

SEQ ID NO: 1261 - protein, 137 aa, Listeria monocytogenes
MPTINQLVRKPRQSKIKKSTSPALNKGLNSFKRELTDVNSPQKRGVCTRVGTMTPKKPNSALRKYARVRLSNGIEVTAYIPGIGHNLQEHSVVLIRGGRVKDLPGVRYHIVRGALDTAGVENRGQSRSKYGTKKPKK

SEQ ID NO: 1262 - protein, 244 aa, Listeria monocytogenes
VEPLFSIGEMAKKSQLSIQRLRYYDKIGLLVPAFTDPTSGYRYYKTAQEEQLNLIQALQYMGFSLQELKQYLDKNTMESLPDLLIKYQQKLKDEEARIARKKWLIDRYQDLLKRETDSTKLLTAARLLLTEPLLTPVHVDILNDPDFHQEVQKTVSHLGLSKSYQQFPGYCVLDGQTYLFIELDHSIGAPGERRLLASERQAFVTPQNWKTPSENENYLLQETVAWINQELVRGYSYETKLTFE

SEQ ID NO: 1263 - protein, 328 aa, Listeria monocytogenes
MNLLVTGGAGFIGSNFVHHILNKHDDYKVVNLDLLTYAGTMSNLEDIKENPNHVFVEGNICDYDLVKKLVTDHKIDTIVNFAAESHVDRSIINPGIFIETNVQGTLNLLNVAKELNVAKYLQVSTDEVYGSLGETGYFTEETPIAPNSPYSASKASADLLVRSYFETYGLNVNITRCSNNYGPHHFPEKLIPLMITNGLDGENLPIYGDGKNIRDWLHVSDHCAAIDLVIHNGKSGEVYNVGGHNERTNNEIVHIIVDDLNLSKDKIVYVEDRLGHDLRYAIDPKKIETELGWEPKYTFDTGIKETIEWYVNNEAWWRPLKSRAKLGE

SEQ ID NO: 1264 - protein, 276 aa, Listeria monocytogenes
MSILVTGANGQLGTELVQLLKEHNLTVTEWDKDSVDIVDKAAVKKAMLDLKPEWIIHCAAFTNVEAAEDELKNVNWEVNVDGTENISEAAEIVGAKLVYISTDYVFDGTKKEAYLPDDKTNPLNQYGIAKLAGEKVALEKNSQTYVIRTSWVFGKYGNNFVYSMLKLAETHKELKVVNDQLGRPTYTYDLADFIRFVIEKNPAYGIYQFSNSGTATWFEFATEILKDKDVTVNPCTSDEFPQKAERPKTSIMSLEKVEKLGFNIPTWQDALVRFKK

SEQ ID NO: 1265 - protein, 708 aa, Listeria monocytogenes
FVLKNNKKNNYTMHSYNCFFISLWGLFVYNSNVYKLLYEQKEPDILNDSRDLHSICFVSTEVEDKNNNVHFIAESADLLADCLVLLEKENKHYLTFMKENLNTIALAEKIEYAPDIICPNKVLKGSLYTNPECIDNSLAGSTFSKDLLKRVANEMKQEVFELTSFNYYCYHLAEKIGHLGEEASYSLSLADLDDSVTRLLDIKDNHYRKDWTILYYVNKFLMMHLENLPKIFEESDEKFQINYLEKLTELIAKLPDEVIFELDALDYLVQNILNDSFEWIKYEAYPACLTLAEIISHRAAPNKFTDTKWLCLEKCVRKGSVNPLRNKKNPTVLTPIKKKFVSFFSRKVVFTIAKLLPVAKDNVLLVSNKISDLDATFMPIYQTIKQKHPEKSVRAYMKMRPEDNHAMYYLTYFWNLGRAKYVFLDDYYYQLYSIRMRKEAEVIQLWHAAGAFKRFGHSSLGFKDSISLDFETRAHQNYTTSVISSSDLKPIYAEAFHMDETKIEAFGLPRLWKLFDQDYKEFRLDYFQKMYPLLKGKKVITYAPTFRGNSEERKAFQLELNLRKMKEELGQEYVVVIKLHPLVSVETQVPEDLADFVLDFSGIEMNDVLIVTDILITDYSSVIYDYSILNRPIIFYAYDLEAYSLERNFYHDYLEFVPGPVVATTEEAIKLIQTNQMITGKLQDFAEKAFEYHDGDAAARIIDYVMQD

SEQ ID NO: 1266 - protein, 236 aa, Listeria monocytogenes
MIYAEILAGGKGTRMGNVNMPKQYLPLKGKPIIVHTIEKFILNDRFEKIIIATPKDWINHTQDIIKKYIFDSRVIVIEGGTDRNETIMNGIRYVEKEFGLNEDDIIVTHDAVRPFITHRIIEENIDMALEFGSVDTVIPAVDTIVESTNHDFITDIPVRGNIYQGQTPQSFNMKTIQKHYNNLTDDEKQILTDACKICLLAGEKVKLVNGGISNIKITTPYDLKVANAIVQERINS

SEQ ID NO: 1267 - protein, 341 aa, Listeria monocytogenes
MINQVYRLVSERQFEEANIEEALTEDVVVVRPTYLSICAADQRYYTGSRGKEMLSKKLPMALIHEGVGQVTYDATGEFEIGTKVVMIPNTPTEDDPVIAENYRRSSLFRSSGYDGLMQENVFMRRDRVVRLPENMDMEVAAYSELISVAFHAITRFKQKANANQSVFGVWGDGNLGFITCLLLKTIYPESKVIIFGKTQYKLDFFSFVDEAHLVDEIPEGLVIDNAFECAGGKGSQYAVEQIIDLIKPEGTISLLGVSENPIEFNSRMVLEKGLTVFGSSRSGKEDFQNTVNFLSENERAVEYLSSLIGQRKVVRNLQDIIEAFETDLRNPFGKTVMEWKV

SEQ ID NO: 1268 - protein, 386 aa, Listeria monocytogenes
MIVKNIAISMYMFLLSLFSFFSRFFGVKKRVLIMASFPENTTAILNQMKKMGYTPNTICFHTERVQFNTKELDFVRFSPNNLANKWKLMFYLNTSKVILVDNYYPELAAVSFKDGVECIQLWHANGALKQFGWEDNSISERSDADKKRFKAVYEHFLKVVVGSDEMGEIFKRSFLLNESHLLKIGVPRTDVYFEESLQQQKRIEWRNKFHAENKKVILYAPTFRDNELAEAKLVMDFNAMERAFSEDYLLVLKLHPAVKIDVQSLNTDFIINVDKNVALEELLAAVDILITDYSSIPFEFALFERPIYFFSYDMEKYDKERGLIKNYQEIIPGPISQTTAELIEQIKTKATSETLALFSKKWNKYSDGHASERMVVYMKQLMEEAK

SEQ ID NO: 1269 - protein, 127 aa, Listeria monocytogenes
MKKVITYGTFDLLHWGHIHLLKRAKALGDYLIVAISSDEFNRIKHKEAYHSYEHRKLIIEAIRYVDEVIPENNWEQKRDDIEKYGIDVFVMGDDWEGEFDFLKDVCEVVYLPRTEGISTSQIKDELK

SEQ ID NO: 1270 - protein, 327 aa, Listeria monocytogenes
LEPLVSVIIPVYNVEKYVKRCLDSVLEQTYHNLEVIVVNDGATDNSAKVIKSISDNRIRYFEKENGGQATARNFGLDVATGDYIVMVDSDDYISKNLVETCLDTVQKTNADLVLFTSYNVNQEGKMQYIKRDKGIKVLDAGPTPWNKFYQADLWKGSRFPVGYWYEDLGIIPVVTLKAKNPVKIQDALYYYITDRADSQSNIQQVDHFLDVVIMLENVETELKKLGIYEESKDQLAYLYIEHLIYRLVLRKAIYITNKQERKKLIKKISTIIQEKFPNWGSYPYQAGGKLTATLKKKALWLYLHHLYLLGDLVWKYPFSIRSKQTGF

SEQ ID NO: 1271 - protein, 337 aa, Listeria monocytogenes
LHKLSVVIAVYNVSEYIEACLTSVLEQNYKNVELIIVNDGSTDDTFQKVEKLVDGHTNVILIDQENQGVSAVRNNGVKAATGDYLGFVDGDDIIAKDMFQKMMDSFEMSDADMVTIGVARLSGDKVYPSTLHERYMVEKKEATTIEETPALLYDTTSWNKVFKKSFWDKHHLEFPEGQMYEDIALMIPAFLYAEKVNIIPDVGYYWRSREGGAKSITQRRNDIAMVNDRLLALKKVNQVLNEKNIQGDLRYQNERKNFEIDLFSMIEWAFLAPKDYYLALQPLIKNYVEQEMKTTALNDIPKEKKRLFKALLANNRPAFLLNSYIYFGKKAVKKITK

SEQ ID NO: 1272 - protein, 153 aa, Listeria monocytogenes
VEIKQIKAKDTQDIRHRVLRPEQPEENAIYPNDDMEGTFHLGAFEKDVLLGVASFYPEKSTVIMNPAQYRIRGVATERRMRLKGLGTALLAEGEAEIWTRGADIIWCNARIVAVGFYEKHGYRKVGKSFVIPGIGEHYLMKKVNPNKKVDQDN

SEQ ID NO: 1273 - protein, 496 aa, Listeria monocytogenes
MTNLFQDDSLTLHTDLYQLNMMKAYFDDGLHERRSVFEVFFRDMPFDSGFVVFAGLERIIHYMQNLRFTETDIAYLHDELGFDGPFLEYLRNFKFKGNILAAKEGEFVFKTEPILQVEASLAEAQLIETALLNIVNFQTLIATKAARIRSVIDDETFAEFGTRRAQEMDAAIWGTRAAYIGGCDSTSNVRAGKIFGIPVSGTMAHAMVQAYRDELEAFRSYAKTHFDSIFLVDTYDTLKSGVPNAIKVAKEMGDKINFIGIRLDSGDMAFLSKKARQMLDEAGFTEAKIFASSDLDEHTILSLKAQKAKIDSWGVGTKLITAYDQPALGAVYKMAAIADENDILQDSIKLSSNTEKVSTPGKKKVYRIITNEDGLKAEGDYIALADESLENVDKLTMFHPVHTYIMKTVENFTARELLVPIFQNGELVYDMPSLDEIKAYKEENLALLWDEYKRTVRPEQYPVDLSVKCWKNKMRNIEKVRKSVQLHSPVELDMPF

SEQ ID NO: 1274 - protein, 274 aa, Listeria monocytogenes
MEIRERILADMQVAETIDAHEEIRKSVEFLKAYLKKNTFLKSFVLGISGGQDSTLTGKLAQMAISEMRAETGDDEYRFFAVSLPYGTQLDESDRQDALNFMEPDNRLTVNIKASVDASVAALAEAGVELSDFAKGNEKARERMKVQYAIAAMHKGVVVGTDHSAEAVTGFYTKYGDGGTDINPLFRLNKRQGKALLKELGCPEHLYLKKPTADLEDNKPALPDEVALGVTYDQIDDYLEGKEVPADAAAKIENWFIKTEHKRHMAITIFDDFWK

SEQ ID NO: 1275 - protein, 102 aa, Listeria monocytogenes
MKVGYGLLTAFYTHPGERDHLVKILLEAAESLEEYNTCIQYIVSESENEADTVFVSEIWVDKGHHEASLDNPAVKATIERAKPLIKEVKRIQELDILGGKGV

SEQ ID NO: 1276 - protein, 134 aa, Listeria monocytogenes
MQTLMIVCAGGATSSLMAQNVVKSATSEGMDAVLLFPDDVKYKDSFREKYSTRDLVVVMGPVGAITAGKFRDYKEQVDAVLVAPQVKYMYKTVEEVLGELNIPCANINSLDFGRMRGDKILTQGLALMNAKNSK

SEQ ID NO: 1277 - protein, 518 aa, Listeria monocytogenes
LFKIMKDFTEQEKIIVLDFGSQYNQLITRRIREFGVYSELHPHTITVEEMKALNPTGIIFSGGPNSVYDEDAFRADERIFDMGIPILGICYGMQLMTTHFGGKVERAKDREYGKADIHVEKPNRLFAGLPTDQVVWMSHGDLVVEEPAGFEVTVTSKSCPIAGIADEERSLYGVQFHPEVRHSVYGNELLKNFALNVCGCKGDWTMENFSEVEIAKIQEIVGDKKVLLALSGGVDSSVVGVLIHKAIGDQLTCIFVDHGLLRKGEADQVMETLQGEFNMNIIKVDAKKRFMDKLAGVSDPEQKRKIIGNEFIYVFDDEANKLDGVEFLAQGTLYTDIIESGTATAQTIKSHHNVGGLPEDMQFKLIEPLNTLFKDEVRALGTELGMPDAIVWRQPFPGPGLGIRVLGEITEEKLEIVRDSDYILREEIKNAGLEREIWQYFTALPNIRSVGVMGDGRTYDHTVVVRAVTSIDGMTADWARIPWDVLEKISVRIVNEVDHVNRVVYDITSKPPATVEWE

SEQ ID NO: 1278 - protein, 400 aa, Listeria monocytogenes
MTNDQIKKAKNGTYYFRANLGYDVKGKKIQKYRSGFKTKKEAREEYSRLLLMNPDDLNENKDKMMFEYYINEIFLPWYKTQVKLRTYENRIPTIQKHFPYFYKMAVSDIEPINVQDWQLKMTKNLKPSYVRAVQGLFSVAMDRAIVLGITTTNPSKIIGNVKKVKPKVEFWTKEEFEKVLSLIYKEDYYQNFLFISLWFLFMTGMRIGEATAIQWEDIDFETGVVSITKTLYYKSQIDYKFVEPKTKASVRHIVLDKVTLSYLADWREVQQNVVKTNFVMSYNGIPTQKHTIAHAIDRFSKMAGIHRIKIHALRHSHASLLISMGENPLIIKERLGHEDIETTLGTYGHLYPNSNFEVASKLNGIISFQPAEQNLDSSPKNQFTVNYRQNKQPNSAIKVQ

SEQ ID NO: 1279 - protein, 139 aa, Listeria monocytogenes
MTTTSNYEKTIEHQFDSFCKTVVRNFARDIYDENKRRNERLISLEALSMAELSQLSIFDDYDSNYIIMASYDYDIRIEDVLIAQAIGKLTKRKQDIILLSFFLSMTNADIATLMDLAESTVHYHKTNALKELKKLMEEH

SEQ ID NO: 1280 - protein, 147 aa, Listeria monocytogenes
MAKMYPYLAFENAKEALGYYEEVFGATNISRLPVSEEQSEMFGLPKENLENTTVHGGFTVLGANLFCSDSFGKEVKPSNQISIMLDSNSEDPAAVADADAFFEKVSSSGRVTVTLPFEEQFWGGKMGQFVDEYGISWMIHTQPYSKL

SEQ ID NO: 1281 - protein, 707 aa, Listeria monocytogenes
MSKASKQTTYRVDGMSCTNCAGKFEKNVKNLEGVTDAKVNFGAGKISVYGETSISQIEKAGAFENLRVTDEKDYSSKPAKKESFLKKNWHLVVSIIFIILAFISQNISGEDSTTTIILYVIAIVVGGFNLFKEGFANLIKLDFTMESLMTIAIIGASIIGEWAEGSIVVILFAFSEVLERYSMDKARQSIRSLMDIAPKEALIRRDDVEQMIAVSDIQIGDIMIIKPGQKIAMDGVVIKGYSAINQSAITGESIPVEKKVDDEVFAGTLNEEGLLEVKVTKHVEDTTISKIIHLVEEAQGERAPAQAFVDKFAKYYTPTIMLIALLVVVVPPLFFGGDWDTWVYQGLSLLVVGCPCSLVISTPVSIVSAIGNSAKNGVLVKGGIYLEEIGGLQAIAFDKTGTLTKGKPVVTDFIPYSEHMDEQNSLSIITALETMSQHPLASAIISKAMIDNVDYKSIEIDNFSSITGKGVKGEVNGITYYIGSSKLFESSLEKSQSISQTYQSLQKQGKTAMLFGTESNILAIIAVADEVRESSKEVIAQLHKLGIAHTIMLTGDNNDTAQFIGKEIGVSDIKAELMPEDKLTYIKELKQTYGKVAMIGDGVNDAPALAASTVGIAMGGAGTDTALETADVALMGDDLKKLPFIVNLSRKTLKIIKQNITFSLGIKLLALLLVLPGWLTLWIAIVADMGATLLVTLNGLRLMKVKK

SEQ ID NO: 1282 - protein, 491 aa, Listeria monocytogenes
MKLNELMQAIPVFTGEVSETIEISHIAQDSRKVKPGTLFICIDGEVVDGHKFASRAVELGAVAIIAEKQVDVSIPVIYVRDSKRAMAMLADYFYGSPTQALKLVGITGTNGKTTVSHLVEQIVRENGEQTGLIGTMYRKIGDQILETKNTTPDSLTLQETFRDMLLSGVSTAVMEVSSHALVQGRVYGSDYDVAVFMNLSQDHLDYHHTMEEYANAKSLLFAQLGNSYHTSNPKIAVLNADDAESVRMQKATAAHIITFGIKQEADFQASNIKITSHGSTFDLGTPVGNFTLKIKMIGNFSVYNVLAAIATSFALHIPMEKAIKTVESIPGVKGRFELVHAGQEFPVIVDYAHTPDGLLNVLETIDEFAEKRVFVVVGCGGDRDKGKRPQMAKIAVDYATNPIFTSDNPRSENPRAIIEDMIQGVPESDAYVVHENRRDAIRFAVNQAEAGDVILIAGKGHEDYQVVGDEVIDFDDRVEARIAIEKKLGLA

SEQ ID NO: 1283 - protein, 751 aa, Listeria monocytogenes
MKRRIGNMRRGALVLFIFFTILFLLVSGRFLYLQITGEANGVPLAAKASKQHLKSSVLEAKRGSILDRKGEVLAEDTASYTVAAVVSDKLSKTTKNPMRVVDEEKTARILAKYIPMDESDILDKLHEKGKYQVEFGAAGKNISTETKAKIDKENLPGIEFTRQSERFYPNGTFATQLIGFAQQEEEKNATVLEGKMGIESRYNDILTGKNGKIDYSTDRMGYILPNSKNKVTEAKDGKDITLTLDKKIQTFLEDTMTTVDAKYKPKNMMAVVADPKTGEILAISQRPSFNPADRSTITGNSSSIWQDLPVEYAYEPGSVMKIISLASAIDTNAYNANEYYQSGSYKVGDIAIHDHNNGNGWGSITYREGVERSSNVAFAKLLNKMGTDTFKTYLDKFGFGKKTGIALPNETSGKILYNYPIEKVTTVFGQGTTVSMMQMIQAASAIASDGTMKEPYVVSSVKDPNTGEETDTKTKIAGKPISAETAKKTRDELKNVISGEHGTGKLYAIPGYDVAGKTGTSQIPDPKTGKYMTGADNYIFSFLGMAPADNPELVIYVTMQQPQLSGSQTGGEAVSEVFNPVMKNSLQYMNIKPGDAEKLASEKVPVLAGKKVDEAKKIVKDKGLEPIVVGNGKKIVQQLPQANAEIMQGQKVILMTDGDMTAPDMVTWSKDDALKVSEITGIPFEFSGNGYVKSQSVSAGSVINSETKMKITLAPPEEISAFNQNHDQDTAEKNKKATDIQENAGIGDLLN

SEQ ID NO: 1284 - protein, 120 aa, Listeria monocytogenes
VSNVAYKSNLEPNRVHREAEQPKKQILKRGQMTLGEKVIITIALAIVLVVAFRIISVQAQIYTVNQEIQTKETKILEQQKSNEDLKVEVKDLGRYERILKIAKEKGLKLDGDNVKVVDGQ

SEQ ID NO: 1285 - protein, 312 aa, Listeria monocytogenes
MFKHETVLLHETVDMLEVKPDGIYVDATLGGAGHSEYLLNKLNEKGHLFAFDQDQTAIDNAKIKLADYSDKVTFIKANFRDMKEALNERGIEAVDGILYDLGVSSPQLDERERGFSYHQDAALDMRMDQEQELTAKTVVNEWSYQDLIRIFFQYGEEKFSKQIAREIERRREVKPIETTGELVDIIKTAIPAPARRKGGHPGKRTFQAIRIAVNDELGAVEDSLEKALTLIKPGGRISVITFHSLEDRITKQLFQEATKGPDLPPGLPVIPDEYKPDFKLATRKPIVPSEEELEQNNRARSAKLRVIEKIIK

SEQ ID NO: 1286 - protein, 143 aa, Listeria monocytogenes
MFMGEYQHNIDIKGRLIVPAKFRELLGDNFVITRGLDKCLFAYPQEEWKKLEEKLQTLPLTKKDARSFTRFFFSGASECELDKQGRINIPSNLLQYADLEKETVIIGVSSRIEIWSKSEWDDVFNEAEESFADLAENMIGFDI

SEQ ID NO: 1287 - protein, 450 aa, Listeria monocytogenes
MKEQSKRLGEDSIPSLMARLSIPAFIGMFVMGMYNIVDTIFVSYGVGPSGVAALSIAFPVQMILMAMAAMFGIGGASIISRSLGAGEQKHADKVFHQVIWLVLISSIFIAIVTFIFLDPLITLFGAPADIHDIASDFLSLILLGAVFQTFAMAMNNIVRSEGNAKTAMLTMIISAILNMILNPIFIMGFGMGVRGSALATVIAQAVGAIWLLIYFLSGKSTLSLKGFSFRMDFPLIRRIMAIGFPSFIMMSAGSIVTVAVNWMLNIYGGTMAIAVYGIANRIASFVIMPINGVTQGMQPIVGFNYGSRQFERVMKAVKVSMIAATVMSLIAWGLVEIFPGLLVRIFSNDPELIAQGTTAVRFMLLAAPTIGFQIVCGGLYQALGRARISFIISLMRQIICLVPLLLILPHFFGLDGIWYAFPLADLGAFAVCLVIMSKTWRRIFKNPEIV

SEQ ID NO: 1288 - protein, 415 aa, Listeria monocytogenes
MFRELHPNIRARILIQFLSKVIGSMIFPFMAIYFSMEINSSVAGFLLMINVLAQFLAGMYGGHLADIIGRKKLMVTGELLKVFAFLGMVLCNSPMFHSPWITFVMLLIIGVAQGLINPAGEAMLIDVSTLENRSFMYSVSYWANNLSIMIGIMVGGWFFVDYLFPLLVVLFIMSFVTAWLTISLISETLQQKEMPHKGSYGLMGMLKNYGQVLHDYRFLLYTIGGIAIMSIEFQRSNYISVRLAEDVKALLVHLGPLGNISLNGVQIVSVLTAVNTLFIVLFTVPIARFVTKRAQQPIMYVGFTLFALGFAVCAFANNLAVLLLATMVLSIGELLYVPTRQTILAAIVDDDKRGAYMAFNGIIFQIGKMIGSVSLVFAPFIGKYGMGAFTIILGILSIVFSAVALKSGWEKVLVK

SEQ ID NO: 1289 - protein, 604 aa, Listeria monocytogenes
MDKDYFTMRAHLYNITTDLEVPFKLNDVANIWFCTTKNAKRKLQQYQAKKMLTYLPGLGRGNVSRIIFPKQLELEVLDVLEQSLAEDAFSNILFLLQLPIPKSWFTSISTEIQQMFGLQVTENQQEVLRSIVRRKLTTLDPLQTSVSMEAFLITQISDSLVKYDEKKKRIIPHIAHHWKVSDDFTEWTFYLRKSVLFHHGRTLDSEDVKYTLMRSMQAESVSFWQLQDIQSIYCPNKFTLSIQLKKTDPFFIRYLCTANMAILPRDIIFDEYKWISTGPFRVAERNDERLILEAFDGYFLERPILDRVEFWTVQTGNNLKTIPMQFTSVDYEENPAYVERRKPGVGVNFICFNTHRNGTPQHPAFREAIYHLIDCQKASDQHFENYGTVASNYYPEKSLPPKKHPEKITTLLKTANYQGEKVVFGTTQHPTAVKESKWIQEQAVKFGINLERKIISHQEASYSNVPAEETDFMMMGEIPASDDEMAYLDFLNNPYLLPQQLFNQVIIKELTEKLVAFKKEKDASKRDALQTSIDSWLTENHYLIYLHHPEKSQSLHSMIKGIAENPYGYFDLSKVWIETSPLKTLKPDYKQSHRGKAPHTIKQK

SEQ ID NO: 1290 - protein, 128 aa, Listeria monocytogenes
MFDWLTNSTAIIIILPVVVFILTMFFSSFKLKKSQRRIMLAADLSTIFLIIAVHFFMIVLFNRSFLLYILLFLFILGIVIVVTAAKKEGEIQFRKILRGYWRLCFFIFALLYVALYLYGIVYSLVLMF

SEQ ID NO: 1291 - protein, 297 aa, Listeria monocytogenes
MANQLKVGIIGAGAMGLLYAANFANISELTLFTRRKEQSDLLNQKGLSLKDNSELKNIHIQATVITDAEKLSEQELLIIAVKQYSLKTILPLLRSIPERVPLLFIQNGAAHLDSMPLLGNKRTILLGISEHGAGREDDTTVIWRGHGRTKYSIYQGELNEAVIKILDSNPDFPVEKHASYLDIINEKLFINAVINPLTAVLQVQNGKLLENKEWHELLKTIVKEIQTVLPVENALEKVEVICQVTATNFSSMALDRMNNRMTEIDGIVLPILEKGESLPTLHALYHLIKGLEGESDV

SEQ ID NO: 1292 - protein, 178 aa, Listeria monocytogenes
MKWSISQLKKYRDSNFTINEKADLKKFFQENNIDVRDASPVQITGELIVHPEEVTANLTMRGEWTLPCARTLEDVIYPYEVHATETFVKSKEQVLDESWHVMEQDMVDLTPVVEELLLVEIPMQVFSEDALEMSNLPRGKEWEMKTEEGNLLEQIAKEPKVDPRLAGLANFFDEKKED

SEQ ID NO: 1293 - protein, 390 aa, Listeria monocytogenes
MKATGIVVEYNPFHNGHKLHLNKARELTQADVVIAVMSGSFVQRGEPAIIPKWERAKMALSAGVDMVVELPVSFATQHATIFAEEAVRILDAIHIDTLFFGSEHGVAEDFTFAAKKVVENEARFDEAIQLALVDKKTSYARAYTEAFKKLFGQNLLDITKPNNILGFHYALAVQKQNPSISLQTIPREHAGYHDEEASHDQIASATAIRKLILAGKLEEASHYLPASSIDILRNYEGPFLSWTDYWSFLQYRLIQASTEELEGIRGVSEGIQNRMQQAATKAQNFSDFIELTKTKRYSNARLQRTALQILLNAKSKASSPYIRILGMNKTGQKYLSLHKKNISLPIVTTVSKAPPGLLEEELRATNIYTLVKKLENYQAGDFHIPPILTL

SEQ ID NO: 1294 - protein, 746 aa, Listeria monocytogenes
MVQEYIRLRGARENNLQNISLDIPKRKITIFTGVSGSGKSSIVFETIATESQRQLNETYSAYLRNFLPKYTQPDADSIENLSTSVIIDQKRLGGNSRSTLGTITDINSILRLLFSRVGKPSIGTANLFSFNDPAGMCPDCHGVGQKVSVDLVKLLDPNKSLKEGAILFPTFSVDSWYWNSYAYSGFFDVNKKIKDYTDEEYDMLLHGKDIKVFLETPMGSMNATYEGLIPKFNRLYIQKEGEMSASTKKRVDKFTHIAPCTTCEGTRLSAQALSCKINGANIADFTAMQLDELKDTIARIDDPIATPMVKSVTERLQHLIDIGLGYMTLDRQTASLSGGESQRVKMIRHLNSSLTDLLYIFDEPSIGLHPRDVHRLNELLVKLRDKGNTILVVEHDPDVIKIADHVVDVGPHAGKHGGEIQFVGSYTDLLKSDTLTGQFLNRHLPINSKPRQPKGFLTTEKSSRFNLKNIQANIPKEVLTVITGVAGSGKSTLIHSVFLKEYPDAIVIDQSAAHANIRSNPATYTGIMDPIRKAFGKENDVSPSLFSYNSKGACENCKGLGFTTMDLAFMDSIRTPCEVCHGKRFQDSVLQYKLNGKSISDVLELTVSEALDFFTDKKILKKIEAMEEVGIGYVTLGQALSTLSGGECQRLKLANELHKKGSIYIMDEPTTGLHMSDIEHILTIIHTLVNKGNTVIVIEHNVDIIRNADWIIDLGPEGGSAGGQIIFEGAPLDLLENQQSLTAKYL

SEQ ID NO: 1295 - protein, 149 aa, Listeria monocytogenes
MADRQESLAKAIAIIHRSESTFKNKKLLETGLNIGQLRYLWTLYKEDGISQESMAKRFMVDKASVTRHIKRLEELGMIRREIDAKDRRIQRIFVTETGFQMRDLIEEVTAEWSALLTANFSEKEKDDLMHLIGRLSDNAIIAVEGGESE

SEQ ID NO: 1296 - protein, 346 aa, Listeria monocytogenes
MRKEWKKITAIVLLIIIIAGFFIPVPYYISKPGGTEELAPLVTVDNHPNKKDGSLSLVTIAMGKANIYTYMTAKFLPYHELEKDSEIKYENESDEEYNVRQMQMMNESKNNAIQVAYKAAGQEVKVTYDGVYVLSVKDDVPAADVLHAGDLITEIDGNAFKSSQEFIDYIHSKKVGDTVKINYKHGDKNEQADIKLTAIDKKGTPGIGITLVDDEKITADPTVKIDSEKIGGPSAGLMFSLEIYSRFQKNDLTDGKKIAGTGTIDPDGTVGRIGGIDQKVVAADKSGAKIFFAPNDPITEEMKKSDPSIESNYDTAVKTAKDIDTNMKIVPVKTFQDAVDYLKKLQ

SEQ ID NO: 1297 - protein, 160 aa, Listeria monocytogenes
MGDKIAVIPGTFDPITNGHLDIIERAAKIFDVLYVSVLNNSSKKPLFTIEERMEMIRQVTAHLPNVQVESASGLTVDYAATRGATAIVRGLRAVSDFEYEMQIASMNRTLNADIETFFVMTNTKYSFLSSSMVKEVAQYQGDISELVPEIVNKAVQAKFK

SEQ ID NO: 1298 - protein, 185 aa, Listeria monocytogenes
MRVIAGERKGHALKAVPGNNTRPTTDKVKESLFSIIGPFFDGDMVLDLFAGSGGLGIEALSRGAERAVFIDQAALAIKTIRQNLEGCHFTERAEVYRNDAERALKLLHKNEWKFDLIFLDPPYKKQQLEKLIGTLEKLELVNENGRIICEHDKEAIMPDTIGKFEKIKSVSYGITVLSIFEFQEA

SEQ ID NO: 1299 - protein, 93 aa, Listeria monocytogenes
MENDRQAIVVWMNHLKQVRSLKRFGNVHYVSRKLKYAVLYCDMAEVEDISNKVSRFHYVKRVEMSFRPFLKTEYESKKEMMYEHKNEDVQISI

SEQ ID NO: 1300 - protein, 149 aa, Listeria monocytogenes
LLATMENMALLDLSDELASMILNSEEAQNYKLAKEALLNDATSQKNIRQFIRIKEQYEEVQRFGRYHPDYKEVTRKTRAYKREVDMDQNVAAFRRAEMDLQSLLDEISLLLASAVSENIKVPTGNPFFETKSACSTGGCGSGGGCGCSA

SEQ ID NO: 1301 - protein, 351 aa, Listeria monocytogenes
VKFIMRVAVLLIICLFIGYNTDLFFSKSVEKNTAEDTATKSNFPDNKKTTNENPKQVQDSSSLARFINKNVSELKKEFGDPVRVDKTAYGYDNYIYSQPGTSYMQVGVAKNIVQTIYALGQDLNVMPYTIGMSTEKVFTDANLQSEISFNYKDSYYKFELSEEDLNARPIVNIGSGVYAQLNFDKFKSKLISVRYLNKLSFVKMRPYELSYQGEIYEEKLSPADWNAIDDASSKQVLEITNVIRDRYGIEEVAWDESVARVAYGHSVDMKKNDYFDHTSPTQGDLSKRLSKGDVKYTKAGENIAYNYVDSAAAVEGWLNSKGHRENLLDGSYTYMGAGTYRKYYTQNFIIK

SEQ ID NO: 1302 - protein, 293 aa, Listeria monocytogenes
VHIKILKNRYPNIVVSKNPIKSSSDTISFFEEPYYFTIPKSNLSEEEAMLLHTLFPEPLPTFPKESTQFWFDLLFGNKELAMTNEKETYRITQFHIKTTTTKSMLQEWQKALLSFFSPEAELIMFSTNYGVIIEKSTGSLLGEEELIAVAGTLENDFYIQSTFFMGLFHPLNDRLRGLFAEERAIFNHNNREVVQTVASESLKVIALRMKESLITNELNDLFHQDDTWIPLIHTLFKNQGNISLTAKELFMHRNTIQYRLDKFYEQTNLSLRKMDGLLLAYLSTLQTNNSNHE

SEQ ID NO: 1303 - protein, 301 aa, Listeria monocytogenes
VNQIEKTGELSASRFTVRDFTELVKIGIVNSNTITAFTGMWLAFQLNGISFIQNVDVIFFTIVGSALIVAASGAFNNVIDRDIDGIMERTKNRPTMTGKISGKRALMVALVLGVVGTIMLFMTTWQAGVLGVIGVFLYVVVYSLYAKRKLVSNTVIGSFSGAVPPLIGWFAVEPTFSIVPIMLFLVMFCWQPPHFYAIAIKRKEEYAAAGIPMLPVVKGIERTKKSMFFWVILLTILPFFMFDLGIVYVILATLLNIGWLALSIYGFKMEDSIKWAKWMFVYSLNYMTILFVAMVVISIFL

SEQ ID NO: 1304 - protein, 227 aa, Listeria monocytogenes
MSFSQYIIYFIIVAAIPLWAQYRVKTTYAHYSKVGVANGLTGAEVARHILDTNGLTNVPVHETNGMLSDHYDPRKKAVFLSEANFRGRSIAGAAVAAHEVGHAIQDQQDYAFMRFRSALVPVTMFSSNISWVFLIIGMLANVASFMLLGIILMAIGVLFQLITLPVEFDASKRALVQLESGGLVAPSELPQAKKVLSAAAMTYVAAMAVAVLELLRLLLIFTNMNRN

SEQ ID NO: 1305 - protein, 198 aa, Listeria monocytogenes
LLYSLLANRAFLRLLFFGNLLGAIYGYIWYLPQLQMTEPRFWLFVPDSPTAILFFTLALVAFLGKKHWPLMEALGFVCLVKYGLWAVGMNIFYMVDQGVLVWGSVVLILTHGFMAVEGILYAPFYRFRIGHFMIAAVWVFHNDVIDYVFGQMPIYMGLEKYLPEIGYATFWLTVLVLWFVYDKTIKNKHLTLEFPHDE

SEQ ID NO: 1306 - protein, 181 aa, Listeria monocytogenes
MKASISIDEKKDFIRWFLNKHQMKTREAMWVLNYIAGHDQIVKYVHFVDNLEGCARGLSLSAHGVESEPFLFFKGNIMTTDPEKAFHDIRLNWDEELYVELHFEEAMSSPEYALVREDNPFAAVKLADEEKEMADALIYQSVHQFSREKVLQQIDEALDTRDEAAFHKLVRILQQMDTEKE

SEQ ID NO: 1307 - protein, 417 aa, Listeria monocytogenes
MELANKMLHALEHEDMALAKKYFDEVVQAGTDEEQYYLAEELFTLGFLDETEDLYELLLAKYKDEGELLVRAAEVALEKDDIDSAQDYLEKVNKEDEAYIESLLVLADLYQMQGLFEVSEQKLLEAKQIAPNEPIIDFALGEYYLSQARFASAVQSYQTAVEAGLTIISNGAVSVYERIAEAFAASGAFEEALSYYERALEDKESIDTLFGMGLTAYQAKDYTKAIHALEHLREHDPSYTTLYSYLAKSYEENGEPEKAIAVLKDGLMQDEFNKEMFLEAGKLAVKLRLPEEAEEFYRQAIVLDEEYSEAIMQLNKLLIAQENYEGVIELVEGLGEEVISEPQIFWDVSVAYQETEQYNKAKANYELAYSHFTNNPTFLKEYGLFLREEGEHAKSQEVLRNYLELEPEDTEILSLFD

SEQ ID NO: 1308 - protein, 428 aa, Listeria monocytogenes
MKLITNKQGLVGAITVPGDKSMSHRSIMFGAIAEGKTVIRHFLRADDCLGTIKAFKALGVKIEETDEEIIVHGTGFDGLKQADGPLDIGNSGTTIRLMMGILAGRDFDTVILGDESIAKRPMNRVMLPLQQMGAKMHGKDGSEFAPITITGKQSLKRMEYHMPVASAQVKSAIIFAALQAEGETIIHEKEKTRDHTEHMIRQFGGEIEMDGLTIRVKGGQKFTGQEMTVPGDVSSAAFFIVAGLITPGSEIELTHVGLNPTRTGIFDVVKQMGGSLVVKDSSRSTGKLAGTVVVKTSKLKGTEIDGDIIPRLIDEIPVIALLATQAEGTTIIKDAAELKVKETNRIDAVATELNKMGADITPTEDGLIIHGKTPLHAANVTSYGDHRIGMMLQIAALLVEEGDVELERPEAVSVSYPTFFEDIRSLLK

SEQ ID NO: 1309 - protein, 367 aa, Listeria monocytogenes
MKGTIVIVGLGLIGGSIALAIKAKHPEAHIIGIDVSYHSLEVGKSLGVIDEIGESILIDGPKADLLIFCCPVKETEQLLMRLPGLRLKENVIVTDTGSTKGTIMEASTALRESGITFIGGHPMAGSHKSGVRAAKELLFENAYYLLTPTKDVTEDNVTDLKTWLSGTNAKFLVLSPNEHDEITGMLSHLPHIVAAALVNQTQSFTEEHPAAFRLAAGGFRDITRVASSDPRMWTDISISNKKTLTKQLTIWRDSMNQALEMLESEDATSIYAFFDGAKEFRDSLPVHQGGAIPSFYDLFVDVPDYPGVISEVTRYLGEEEISLTNIKILETREDIFGVLQITFQSDEDRDRAKRCIETRSNYTCHYE

SEQ ID NO: 1310 - protein, 151 aa, Listeria monocytogenes
MTKNNISFYVVDASEELTMNIKEASEKSGVSADTIRYYERIGLIPPIHRNENGVRKFGAEDLRWILFTRQMRRAGLSIEALIDYLALFREGEHTLEARAELLKKQRIELKNRIDVMQEALDRLDFKIDNYDTHLIPAQEELKDFNVERSNS

SEQ ID NO: 1311 - protein, 360 aa, Listeria monocytogenes
MKWKKSLAGLSSYKPGKREEEVMAELGLTKITKLSSNENPLGTSPKVAALQANSNVETEIYPDGWASSLRKEVTNFYQLEEEELIFTAGVDELIELLTRVLLDTTKNTVMATPTFVQYRQNALIEGAEVREIPLLTDGAHDLEGMLNAIDEKTTIVWICNPNNPTGNYIDLADIQAFLDKVPSDILVVLDEAYIEYVTPQPKKHEKLIRTYKNLIITRTFSKIYGLASARVGYGIADKEIINQLNIVRPPFNTTSIGQKLAIEAIKDQAFIEACRISNANGIKQYEAFAKRFEQVKLYPANGNFVLIDLGIEARTIFSYLEKNGYITRSGAALGFPTAVRITIGKEEENSAVIALLEKLL

SEQ ID NO: 1312 - protein, 124 aa, Listeria monocytogenes
LRAIRGATTIETNIPEEIYAATKELFEEILTQNEVTNSEQLTSVIITVTEDISAAFPAKAVRETPGFELVPVMGMQEIPVPNSLPMCIRFMVFTDLHKPLGAINHVYLRGAKVLRPDLVKEGDA

SEQ ID NO: 1313 - protein, 365 aa, Listeria monocytogenes
MPEITVRAKSKTYPVYINEFALEDIREKWTKSLAKFSHVFVLTDGHVAELHKAKLDAVLADLPVVTYYVAPNGEEAKTFRVYEDVMTKMIETGLDRKAVLIAFGGGVIGDLGGFVAATYMRGIPFYQVPTTVLAHDSAVGGKVAINHPLGKNMIGNFYQPEAVIYDTQFFATLPERELRSGFAEMIKHALISDLTLLRALMDTFTEPKDFYTKDLTPFLQRGIEIKANIVAQDETEQGVRAYLNFGHTFGHALEAYGNFGKWLHGEAITYGMIYALTMSETIYGLDFDLAEFKTWLEQLGYDTTFDASVPFSKILENMRHDKKTTFNEISMVLLEEIGKPVIFKADDDLIFETYKRVMRKGGNVI

SEQ ID NO: 1314 - protein, 388 aa, Listeria monocytogenes
MRYLTAGESHGPGLTTIIEGLPAGMPLLAEDVNKELKRRQGGHGRGARMRIEKDQVQITAGIRHGKTLGAPVAMFVENKDWKHWETVMSIEPVPEKNEKSRRVSRPRPGHADLVGGMKYGHNDMRNVLERSSARETTVRVAAGAVAKKLLHELGIEVAGHVLEIGGTRANLTRDYAVAEIQETSEASPVRCLDGVAAEEMMQKIDDAKKNGDTIGGIVEVVVGGVPAGLGSYVQWDKKLDAKIARAIVSINAFKGAEFGVGFEAARKPGSEVMDEILWSKEDGYTRRTNNLGGFEGGMTNGMPIVVRGVMKPIPTLYKPLQSVDIDSKETFNASVERSDSCAVPAASVVAEAVVAWEVAVAVLEKFDGDRFDTLKKHVEEHRNLTKEF

SEQ ID NO: 1315 - protein, 134 aa, Listeria monocytogenes
MTTLENSVIFDKGELITNDYFIGNTYLKMLVPEDTVYNCPIGNVTFEPGARNNWHKHDGGQILLVTGGTGYYQEEGKSAQLLKEGDVVTIPKDVKHWHGATKDSWFVHLAISTNVELGGTTWLEPVSDEHYNNL

SEQ ID NO: 1316 - protein, 148 aa, Listeria monocytogenes
MAVSNATLKEAVDVLKKTGVRITPQRHAILEFLINSHTHPTADDIYRALEGNFPNMSVATVYNNLRVFRDAGLIKELSYGDASSRFDFSTSNHYHAICNVCGKIVDFHYPGLDEVEHFAAHMTGYEIDNHRLEVYGICPACKEKQSNN

SEQ ID NO: 1317 - protein, 304 aa, Listeria monocytogenes
MNGIIPLWKERGMTSHDCVYKLRKILHTKKVGHTGTLDPEVEGVLPICIGRATKLAEYVTDEGKVYVAEITLGKSTTTEDATGETVNTKELAEISAAELQAALTKLTGKITQIPPMFSAVKVNGKKLYEYARAGIEVERPSRQVDIYSLIRLDGDTALNQSNPTFQLEIACGKGTYIRTLAVMIGELLGYPAHMSKLERTRSGFFKKEDCLTLTEIDEMMQASDSSFLYPLEKGIESMAKLVIEEEVYAKVLNGGLLPTSLFAEVENEPRAALIFKDKLTAIYKPHPEKKDLWKPEKVIELNQA

SEQ ID NO: 1318 - protein, 114 aa, Listeria monocytogenes
LNVRANRVSEQMKKELGDILNRKIKDPRLGFVTVTGVDVTGDLQEAKVFISILGTDKEKENTLLALAKAHGFIRSEIGRRIRLRKVPEMSFEIDNSIAYGNRIDELLRDLNNDQ

SEQ ID NO: 1319 - protein, 92 aa, Listeria monocytogenes
MIQSVVSEFFMQEPQNLKEKRAILKRIITRAKQKFNISIAETDYQDLWQRAEVSFAVVSSSHIQAEKEAREVLAFLDSFPEWERAETVMEKL

SEQ ID NO: 1320 - protein, 203 aa, Listeria monocytogenes
MYKAIIFDVDGTILDTERAVLHSLQAVLAEEGLSYELDELRFVLGITGAAAVEQLNILDQEKVLGKWIEREATFIEEVEVFEGIHKVLHAIPESGVVTSKNALEMEKGFYPFNIQDHFQAIVCASDTENHKPHPDPLLKGLEILGREPHEVLYVGDSSYDMKCAHAAGAHFGLALWGAKTTDGFEKAELVFEKPEDILAYVSK

SEQ ID NO: 1321 - protein, 779 aa, Listeria monocytogenes
MSKVRVYEYAKEHQVSSKKVIEALKDLGIEVANHMSTINENALRQLDNAVDGTNKKAEAPKKETTSNENGNSKGPNKPNMTNSNEKSNKPNKPAGQANKPATANKSQGAKPATNKPANTSNQTQSSGTQQQAGGQKRNNSNRPGGGNSNRPGGNNRPNRGGNFNNKGRNTKKKGKLNHSTVPPTPPKPKELPEKIVFSESLTVAELAKKLYREPSELIKKLFMLGVVATINQSLDKDAIELICDDYGVQVEEEIKVDVTDLDVYFENELNEAVDESKLVERPPVVTIMGHVDHGKTTLLDSLRNTKVTLGEAGGITQHIGAYQLEIHDKKITFLDTPGHAAFTAMRARGAQITDITILVVAADDGVMPQTIEAINHAKAAGMPIIVAVNKIDKPQANPDRVMQELTEYELVPEAWGGDTIFAPISAKFGEGLENLLDMILLVSEVEELKANPDRRAIGSVIEAELDKGRGPVATLLVQDGTLNIGDPIVVGNTFGRVRAMVNDLGRRVKKVGPSTPVEITGLNDVPQAGDRFVVFEDEKTARNIGETRASRALVAQRSATNRVSLDNLFEHMKAGEMKEVNVIIKADVQGSVEALAASLRKIDVEGVNVKIIHTAVGAINESDITLAAASNAIVIGFNVRPTAQAREAAENESVDIRLHRVIYKAIDEIEAAMKGMLDPEFQEKIIGQAQVRQTINVSKVGTIAGCYVTDGKITRDSGVRIIRDGIVVFEGEIATLKRFKDDAKEVAKGYECGITVQNFNDIKEDDVIEAYVMEEIERK

SEQ ID NO: 1322 - protein, 99 aa, Listeria monocytogenes
MDKKALSLLGLANRARKITTGEELVLKAVRNGKAKMVLISEDISEKTEKTIRNKCEYYNVVVKKAGTREMIGGAIGKDTRAIVAILDKGFAVKLAELLG

SEQ ID NO: 1323 - protein, 94 aa, Listeria monocytogenes
MRNKKIPLRKCIITGERLPKGELLRIAYSKDGALTIDPTGKAPGRGFYIVKSVEACEKAKKKNAIFHQLKMPEQESFYDELIAYVKSLEEPTNG

SEQ ID NO: 1324 - protein, 372 aa, Listeria monocytogenes
MSTELLDALHVLEHDKGISREVLVEAIEAALTSAYKRNFKDAQNVRVDLNMENGSIRVLARKEAVEQVFDSRLEISMEEAHKLNPVYQPGDVVELEVTPKDFGRIAAQTAKQVVTQRVREAERGIIYDEFIDREDDIMTGIVERQDSRFIYVNLGKIEAILSQNEQMPNETYHAHDRIKVYLTKVEKTTKGPQIFVSRTHPGLLKRLFEMEVPEIYDGVVEIKSVAREAGDRSKISVYTANEEVDPVGACVGPKGARVQTIVNELKGEKIDIVEWSEDPFTFVANALSPSKVLDVIVNEADQATTVIVPDYQLSLAIGKRGQNARLAAKLTGWKIDIKSETVATELGIYPRNGVEAPEVEEAESETFTEDEE

SEQ ID NO: 1325 - protein, 155 aa, Listeria monocytogenes
MSKVLEQVEAIVAPITDELQLELVDIAFEKEGPNWFLRIFIDKDGGVDIDECAAVSEKVSEKMDENDPITQNYFLEVSSPGAERPLKKEQDFENAVSKYVHVTSYEPIDGRKMWEGTLVSYDGTTLVITITDKTRKITCEIPKDKVAKARLAIQF

SEQ ID NO: 1326 - protein, 122 aa, Listeria monocytogenes
MKLDGVCKINSALGMEYQFGEFYIDRDYLVFDQDFSLGMKKRQTFPVAKLGHMALVREEEEIMLTFSCDNIEFEINGNSHDNLREFRDLLQNKGTDSSAIQKAENKKKARYTTHHYHNFAKS

SEQ ID NO: 1327 - protein, 1444 aa, Listeria monocytogenes
MTAKEEEKQERFQLLMTQIGLQDVTTYEEFTKDAKIEKLVADKKNKTWQFHLHVPQIFPAALFHMMDVGMKRAFSQIAETEMQIVPENQTINETLIQDYWNLIVEPIGKQSPMIGKLLMEQKPTFKEPHFIEVAVHNDMEEATIQQRFQTKIIESYGKAGFPRLAMKMHMLDQSETDEYKAFAQAKQEEDQKKAAEAVQVMQKRQAEGQSGGGGAAPLTGPFQIGYKIKDDEEVKRLGDIYDEERRITVQGLIFATEIRELRSGRSLLQFKITDYTSSMIIKMFSRDNEDAAMFQNLKKGMWVKVRGSVQNDTFVRDLIMMAQDVNEIAGVKRLDTAEEKRAELHLHSPMSQMDATSSVDSLFKQAADWGHKAIAITDHSVAQSFPEAYGAGQKYGLKVIFGIEANLIDDGVPIAYNDQHIALEDATYCVFDVETTGLSAVYDTIIELAGVKMKNGEIIDKFEAFIDPGHPLSATTINLTGITDDMVKGSDPIDVVLKRFKEWSGDDILVAHNASFDMGFINTAYEKVGLEKAENAVVDTLELARFLYPHFKNHRLNTLTKKFNIILEQHHRAVFDAEATAYLAWKLIKDAKEMHNIDFHDSLNDYMGEGDAYKRARPFHATIYAQTAVGLKNLFKLITMSNINYFYRVPRIPRSQLKKLREGLIIGTACSQGELFEAMMQKGMQAAEKVAEFYDFIEVQPKPVYAPLIERELVRDEKALEEILKNIVRVGEKTGKPVVATGNVHYKDPVDKIYRKILIHSQGGANPLNRAELPDVHFRTTDEMLKEFAFLGEEKAKEIVVTNANLVVDWMENLKPIKDELYTPKIDGAEDEVRNMSYAMAHQLYGEKLPEIVEARLEKELKSIIGHGFAVIYLISHKLVKKSLVDGYLVGSRGSVGSSFVATMTEITEVNPLPPHYLCPNCKDSEFFDDGSVGSGFDLPDKDCPHCGTAYQKEGQDIPFETFLGFKGDKVPDIDLNFSGDYQPVAHAYTKEIFGEDYVFRAGTIGTVAEKTAFGYVRNYERDMNMTIRGAEIDRLVAGCTGVKRTTGQHPGGIIVIPDYMDVYDFTPVQFPADATDSEWKTTHFDFHSIHDNVLKLDILGHDDPTAIRMLQDLSGIDPKTIPTDDPDVMKLFGSTESLGVKPADIDSKTGTLGIPEFGTRFVRQMLEQTKPTTFSELVQISGLSHGTDVWLGNAEELIKNKTCELPDVIGCRDDIMVFLIYQGLESSLAFKIMESVRKGKGLTDEMEEAMMANKVPLWYIESCKKIKYMFPKAHAAAYVLMAVRIAYFKVHYPLYFYATYFTVRADDFDLTSMVNGKEAVKATMKEVNDKGMEASTKEKNLLTVLEIANEMLARGFHFQKVDLYKSSADEFIIDGESLIPPFNAIPSLGTNVAKQIVAARENGEFLSKEDLQQRGKVSKTIIQYMDDQGCLEGLPDQNQLSLF

SEQ ID NO: 1328 - protein, 568 aa, Listeria monocytogenes
MRQTMTFIPTLKEVPADAEVKSHQLLLRAGFIRQTASGIYSYLPLATLMLRKIETIIREELEAIGAAELLMPALQPAELWQESGRWNDYGPELMRLKDRASRDFALGPTHEEVITALLRDEVKSYKRLPLTLYQIQTKFRDEKRPRFGLLRGREFIMKDAYSFHATSESLDEVYNLMHQAYSNIFTRCGLEFRSVIADSGSIGGNESKEFMALSDIGEDTIAYSDASDYAANTEMAPVLYMEKKSHELEKDLEKVATPDQKSITDIVGFLEVPIEKTMKSMLYQVDDEVIMVLVRGDHEVNDIKIKNALDATNVELVDPAVAVELLGANFGSLGPINVPENMRVFADNAVKDIVNAVVGANEDGFHYINVNPDRDFSVTSYFDLRMIQVGDLSPDGQGVIKFAEGIEVGHIFKLGTKYSEAMNATILDENGRAQPIIMGCYGIGVSRILSAIAEQSNDENGFVWDKQISPFDLHLIPVNMKSEEQVAFAETLYTSLQDAGFSVLIDDRAERAGVKFADADLIGLPIRITVGKKAAEGVVEVKIRKTGEMIEVRQDELLNTLPILFGDK

SEQ ID NO: 1329 - protein, 420 aa, Listeria monocytogenes
LTTIIAFIFVFGLIVFFHELGHFLFAKRAGIMVKDFSIGFGPKIFAYRKKETQYTIRLLPIGGYVRMAGEDGEEIELKPGYRVGLELTPEETVSKIIVNGKDQYVNAQPIEVSLCDLEKELFIEGYEDYDDTKKVRYQVERDALVIDGKIETMITPYDRSFNAKSLGNRAMTIFAGPLFNFILAILIFTALAFVQGGVPSTDNTLGNVLPDGAAAEAGLKKGDEVLSINGKETKSWTDIVQNVSENPGKTLDFKIERDGKTQDIDVKPATQKENGKDVGKIGVETPMDSSFTAKITNGFTQTWNWIVQIFTILGNMFTGGFSLDMLNGPVGIYTSTQQVVQYGFMTVLNWTAVLSINLGIVNLLPLPALDGGRLMFFLYELVRGKPIDPKKEGIIHFAGFALLMVLMILVTWNDIQRAFF

SEQ ID NO: 1330 - protein, 380 aa, Listeria monocytogenes
MKKIILLGATGSIGTQTLAIIRENPEKFQVVALSFGRNMERGRAIIKEFKPKMVAVWHTRDRVTLEAEFPNVKFFNGLEGLREVATYLDGDVLLNAVMGSVGLLPTLDAIEAGKAIAIANKETLVTAGHLVMRAAKEKNISLLPVDSEHSAILQALNGENTERIEKIILTASGGSFRDKTREQLSAVTVKEALKHPNWNMGNKLTIDSATMFNKGLEVMEAHWLFGVDYDDIEVVIQRESIIHSMVQFVDGSFIAQLGTPDMRMPIQYALTYPDRLYIPYEKEFRITDFSALHFEKVDYERFPALKLAYNAGKIGGTMPTVLNAANEIAVAGFLNGQVAFYNIEALVENAMNRHTSISNPDLDTILQVDQETRAYVKTLL

SEQ ID NO: 1331 - protein, 262 aa, Listeria monocytogenes
LKTRIITAVVALIFFIPFVVYGGIPFELLSILLATIALYEVLVMTKQRIFSMNGIITLLLMWLVVVPDRYLDFLDTLHITEMEVIFILMALLLANTVFSRNKFHFDQVGICMVAAFYTGFGFHYLALTREAGLMYVLFALFIVWSTDTGAYFIGKAIGKHKLAPNVSPNKTVEGFIGGIVCALVIAGGFYYFAELPGNIAFVLALLVFLSIFGQLGDLVESALKRFYGVKDSGKILPGHGGILDRFDSLLFVLPLLHILQII

SEQ ID NO: 1332 - protein, 465 aa, Listeria monocytogenes
MKWDKLLNDKRRRESGVTRSKNTDVRSAFENDFQRIVMSASFRRLQDKTQVFPLEKSDFVRTRLTHSMEVSTIAKSMGNMVTHTIQEENLDQDFTKDHAEKIPEILACAGLLHDMGNPPFGHFGEESIREWFRDNLATITYKNKSLAEILTPQMKEDFYYFEGNAQVLRVVSKLHYLFDQYGLNLTFATLNAVIKYPVSSLKVNKKQIKSKKLGYFYADESLFNEITTATEALDNRHPLTYLLEVADDIAYLNADLEDGVKKGIVNITQILKGFEEVEEHNKVTAACYNELKKKSERYEGQEESFIVQQWLASNVRGQLINRSLEVFYENYDAIMAGTFNDSLIDASSAEQLVQILQSLSFTYIYQDKGIVESEIAGNEIISKLLETFIPAVIYYDSETPERQTAKDKRLLTLISDNYLGCYRKNAEGESETMKLYLRLLLVTDFICGMTDSYAKDLYQRLNGLS

SEQ ID NO: 1333 - protein, 250 aa, Listeria monocytogenes
MSATSLYRLFAPQIEFLSPAEKQVFFYIDNHISIIEKMSLTSLAESTNVSTTTVIRMCHKLKLSGFSELKFLLHSDKTETKPLSKDYSSTFLEKIRLGIEQLPKKEIEQVATRIAYAPKIYIACLGMTKTLGEYFSKSLVTSKKNVVFTYDSFIIDILPQIVERDDLIIIISESGGTENTLSLAEHLKYNLSNVIAIVNNPNAQISQYVETIIYASSEEFGEDSFKHHHAPLLIVIDLILNIFEQQKKLI

SEQ ID NO: 1334 - protein, 362 aa, Listeria monocytogenes
MRKLGISVFPQHVALEESLEYIETAAKYGFSRIFTCLISANDEAEFAKLETICKRAKDLGFDVIADVDPTVFESLNITYKELDRFKELGLAGLRLDLGFSGSEEAAMSFDDTDLKIELNISNGTRYVENILSYQANVGNIIGCHNFYPRKYTGLSREHFLRTSKQFKDLNLRTAAFVSSNSGEFGPWFVVDGGLPTMEEHRGVEITVQAKDLWNTGLIDDVIVGNMFASEDELRALSELNRNELQLAVEFLDGATDVEKEIVLTQKHFNRGDASEYVLRSTMTRVNFKQFDFPAHDTNTIAKGDVTIDNDGYERYKGEMQVALQEMENSGNTNIVARIVPEERYLLDTILPWQHFRLVEKKK

SEQ ID NO: 1335 - protein, 100 aa, Listeria monocytogenes
MELEQTIMQLIVHGGNAKSDAMLAIEAAKKGDFDVADEQIKNAEAALLEAHHSQTSLIQGEARGEKAEVSLLLVHAQDHLMNAITFKDLAKEIVDLYRSK

SEQ ID NO: 1336 - protein, 102 aa, Listeria monocytogenes
MNNIMLVCSAGMSTSLLVKKMTEAIEKQQVDATVIAVAEADFDKYKGNVDVVLLAPQVRFLEKNLKRVLDPLGIPVAIINGIDYGTMDGEKVLNDALAMIEK

SEQ ID NO: 1337 - protein, 892 aa, Listeria monocytogenes
MSSRKEEVLQLLNEKEEKVSAADVAELLQMDRANASRYLNDLFKEKRIDKLPGKPVFYQAIKTTERVNQHVGNMQESAFGRLIGSEDSLKVSIQQAKAAILYPPNGLHSLILGRTGTGKSLFAECMYQFAKESETIPADAPFVSFNCADYAQNPQLLFGHIFGVIKGAYTGAEETREGLLKKADGGILFLDEIHRLPPEGQEMLFTFIDKGEFRPLGESANVHHAQVQIIGATTESPDNFLLETFTRRIPMTITLPSLAERNLEERYQLVEFFLNQEATRLHQSIRVHRKALIAFLLYHASANVGQLQRDLKLACAKAFLHYKTKTANYILIEQDDLPIHVQKGLLHLKDEPEKLNRLIDVNKAIFKFVDTSDEFVETEDVHDVYHAIQEKADQLMKEGKDQSELEEALYVDVDQYFHNYMVQLPTHQTAKEIIAPAVWELTEKVYAMAEEKLNRKYNEKMKFAFSLHLQSTIERVREQKHIIHPDLNNIRKKYPKEFQVAIDLSALIEQELSIEIPFDEIGFLTMFLTEEVVDTSLSQENQVEVIVMMHGRSTATSMVETVQELLSIESGIALDMPLTVEVKAMYEKLKQTVIKLNPVKGVLILSDMGSLTSFGNMLTEELGIRTKTVTMVSTPVVLEAMRKASLGRGLEDIYQSCEQLFENKYKAHVLRAKPVKNAVIFTCFTGEGVAEQLRKVVAPIIDETKIEIIVLQFLHKEAFRERIDQLMEEYNILAIMGSVAFEYRDIPFFSALEVLSEGGLGIVSRILNDEVPYEKLIASLEGNLQAVSSAEQLVYFLRKVISELQLQLNVILESGVDIGMILHLAFLIERVKLGAVDREFPDLNEFAKNHMVEMQITQQMMENVEIEYDIVIPQSEIAYLTQMMLSNQVEEN

SEQ ID NO: 1338 - protein, 441 aa, Listeria monocytogenes
MTESNIPSFWAEKWQEHGYETPTEIQSAMYQPIKDGADVLAVSPTGTGKTVAYALPTLEKIEAIPKTQWLVLAPSHELVMQITEVIRSWLPSDDLTVISLIGGANVKRQIEKLKKKPQIIVASPGRALELIKQKKIKMHEIKTITLDECDQLLRQENFKSTLEIVESAVRDRQLTLVSATKLENPDMFFAQTENTPVMLEVTAKPEELTNVEHLYMDVESRDKATLLRRISHIKDMRGLVFVKDKPRMEILLEKLHYDKVKAAGIHGEIRKEKRKKYLDDFKKGTLTYLIVTDVAARGLDIEDLPYVIHYDLAASEKEYTHRSGRTGRMGKSGTVITFANPREIRTLKQYLTIHNLKGKQVRFYQGKLLDGAVPENKIAKKASRPPKQVQKSKKDDGKKPFRKDKPTGAAGGRKEKPTNSAKPTRNKPNKFNKKPNNFKKS

SEQ ID NO: 1339 - protein, 257 aa, Listeria monocytogenes
MLKAHWKLEWNAHRYIFFATFVGWLICLLIGLFSKLGNGLLEPLVMDSDIDGVVFASGDGVFIALIGFVGASWILIWLLLFLAAARSGIYDENRYLFFQTETPIWKILLNKLIIVLIETAILTAGVLVIIINLAIIGGAEMSFSVGLNIIFDTFLAMGLNTFSLACIIFLATALSMVPVNGFRVGFIGALIYFVIINAIQISIGTDFLPKSSTEIHFYYSLFSSVHFNFIQMGFNLLMALVYFFLATKILNKSADLQ

SEQ ID NO: 1340 - protein, 226 aa, Listeria monocytogenes
MNENLITITGLTKKYRKRKPLNDINLSLQKGKIIGLLGPNGAGKTTLLNAISGLLKPTSGTINLAENSKIAYLPSEDFLPNMVICDYFRIYHSFFPDFDQEKAKQMIRSFGINIKENTKYLSKGNAAKVMLALILCRDVDLYLLDEPFSEIDLISRDDLIKSIATFLKEDATLVVTTHLIQDMEMMFDEIIFLKRGKIIEQIDTETLREEYRKSVMDYYREVFGHA

SEQ ID NO: 1341 - protein, 122 aa, Listeria monocytogenes
MNPTFHADKPIYSQISDWMKKQMITGEWKGEDKLPSVREMGVQLAVNPNTVSRAYQELERAGYIYAKRGMGSFVTSDKALFDQLKIELADAITERFLEEAKSIGLDDQAAIELLIKRSRNHE

SEQ ID NO: 1342 - protein, 327 aa, Listeria monocytogenes
MKLGIMGTNWITDSFIEGAINSGEWNLTAVYSRTEEKARAFGEKYGELTYFTDIEEMGKSDALDAVYIASPNALHYQHAVSLLKNKKHVIVEKPIFSTVAELEHAHQIARENNVFLFEAARHIQEPNFKRLQENIEKVGTIHGATLAYMKYSSRYDQVLNGEEPNIFSLKFSGGSIVDLGVYPLYSAITLFGEPVKATYFATKLPTGVDGLGPIILEYPTFNITIIQGKNSQSFLPSEIYGQKGTLIVDPLTGIEKITFYDNATKEETELAGPVVANDMQFEAAEFARIIEQSDRDTYEYLADLSLKVLRVSNELRHQNDIWFDAEK

SEQ ID NO: 1343 - protein, 321 aa, Listeria monocytogenes
VVGIKDIAKKAGVSISTVSYALNGSPKVTEKTRKRIMTIANELNYIPNMAARTLKTRETKIIGVYLTNYGGIFYGTLLEGLTQTLYKHGYELIACSGTKTHRFLPEKMIDGAIILDANFPSSEIINYANRGHKLVVLDRELTHENVSQVLLDNKGGATLAIDYLSTNFKGDFYVITGPDDSYDARVRLETAKQELARSGDKKVHIIEGDFSEESGERAASIIAKNWKAPVSVFALNDNMAIGMYRYFAGTDLEIGKDVRIIGFDNTDISEYLVPRLATIEYSKYKWGAVAADKLVELLEGGKAENEIIYTTRISGPSVSNN

SEQ ID NO: 1344 - protein, 1086 aa, Listeria monocytogenes
VTMLKEIKKADLSAAFYPSGELAWLKLKDIMLNQVIQNPLENRLSQIYVRAHFGDKIEIYPLLNKDSEVGFNENGVEYRGVVGPFRYSVQMHFHTRGWFYDVIVDGDFEFDLVYLQDLGLAEQAAVRTNEAYMSQYIDYHVTEGATGFTVQARQNQPQNECFPAVQIGALTKIVGYATDGFDIYGTNYKLTSELANLKEKSLPNRVYQYEFAQISIQTELFTNHGETSFYGYVTENQPKASGAPIGNLAELKSNISEQSYQKSTKAILNKHIGTPITGETISDSWLQEKFPDRIQEEKQNAALLSFFTPNYAHVVMREKEAELERPHGSILLDKIDVLNPEATLSATTYMYGAFLSQLVAGNTNMNKWNSHARNPLNILQTSGLRIYIELDSELRLLSVPSVWETSTNYSTWYYQWNDDLITVQTTLTAYSKEAFVTVHSEKGNSYKLVLTNQVTMGTNEYDTTVKKEIKDGIVTYFPADDSPILETYPELQFRVDGTYNELTDERYFAKDYMGTAGLDVFVFEPSDKATFHVQAKLTDEFSKPTEDLEADNKVIRASYDELTAQFHLNHQSTTAEKLNLTVYWYAHQMLVHYASPHGLEQYSGAAWGTRDVSQGPFEFFLATGNKAVLRKLVLTIFSHQYQDTGDWPQWFMFDKYTSIQQEESHGDVIVWPLKIIGDYLEMSGDTEILEEAIPYVDRESKTFTKEQGTLLEHIKLAVKTIEARFMKGTALSNYGDGDWDDTLQPANAQLKKNMVSSWTVALTYQTFKRLAAFLPVGEKYETLANNVQADFAKYMTNDTDVIPGFLYLEEGKAPVWMIHPEDKETNIKYRLIPLTRSVISELVDKKQASRNFEIIGEHLLHPDGVRLMSEPAHYAGGVSTHFKRAEQAANFGREVGLQYVHAHIRYIEALAKIGDKSAWHMLDVINPINIKEVVPNAALRQSNTYFSSSDAAFLDRYQAQNEFSRVKEGSIPVKGGWRIYSSGPGIYLHQLISSVLGIRQTEETLIFDPILPEELDGLECHIELDNYPLDLTFESSDEGCIVVNGEKQPVENAANLYRTGALILPKKNLTTKCSQITIKFQKNNRL

SEQ ID NO: 1345 - protein, 723 aa, Listeria monocytogenes
MKQEKVQDLVNQMTLDEKIAQCLQLSPFLFKGTNKNAELTGPLLQEMKLTDAHTENAGSVLGSSSALDMIGIQEAYLKTNRLGIPLVFMADVIHGYKTVFPIPLALGCSFDRETVRVMAEVSALEATADGHHVTFSPMLDLVRDPRWGRVMESTGEDPFLNSELGKAMVDGYQGDASKLDGNFDRMAACVKHFAAYGAAEAGLEYNTVNMSTRELYQNYLPAYHAAIQAGAKLVMTAFNVVDGVPATMNKWLNRDVLRGEMDFDGVLISDWGAVAEVINHGTARNPKEAAQFSMEAGVDLEMMTTCYIHELKGLIEEGKLSESLLDEAVLRMLHLKNDLGLFEDPYRGLKNNDRTKDILTDDSRGKARAAGVESAVLLENKNRLLPLAKETKIALVGPLASSPDILGGWNVYGEEKDGINVETGLREVFETVEVISTEYTEFSDEDKVAVKAAVQNMDVVVLALGEKNEWGGEAGSLATIRLPEAQYELAKFVQTLEKPVVITLFNGRPLEVKELAESSDALLELWFPGTEAGRVTADLLSGASNPSGKLSMSFPQTTGQIPVYYNHLRTGRPQTPENKGERYVSHYLDIPNEPFYPFGYGKSYSEFELKTSSLPKELNLGEPLHVEVTIKNISDIAGKEVIQVYLQDVTASISRPVKELKAFEKVALQAGEEKTVTFELTSEAFSFYNHQLEKVQEPGLHRIFVGTSSEDVDAFELEVGGYV

SEQ ID NO: 1346 - protein, 754 aa, Listeria monocytogenes
MVKKSKIVIFFLVVAIIFGAVFGTAKMVMQNINLGLDLQGGFEVLYEVSPADGKGTVSKQTLTDTVTSLDKRVNSLGVAEPSIQIEGNNRIRVQLAGVTDQAEARKMLSTTAQLSFRDANDKMMMNGSDLVAGGAKQAFDSSNNPIVTLKLKSADKFASVTKTILAEAPDNQLVIWLDWKEGQKYKTEREKKDPAYLSAPNVSSVLDTDKVEISGSFTTEEAKDLAELLNSGALPVKMKEVYSTSVGAQFGQDALQETILAGIIGVIAIFIFMMAVYRLPGVIASITLVAYTYLVLLILSLLNATLTLPGIAGLILGIGMAVDANVITYERIKEEIKVGRSTKAAFEVGGKEAFRAILDGNLTTLIVAAVLFYFGTSSIKGFATVLIISILVSFLTAVWGSRFLLGLLVKSNWLNNKPGFFAVKRKDIHNLHEGINSFSLKTHFDRFDFVKHHRLFLSIFAAIVIVGIVILSIFRLNLGIDFASGTRAEVTANQTLTETQIKKDLDTIDMPSDDIVFQGSGSKTAVVSYKGTLSQNDVAKFKNYFEDKYKHEPSISTVSPTVGKELAKNGFWALGVASVLIVLYIAVRFEFYMGIAAILSLLFDAFIIFIFFSVTRLEVDLTFIAAVLTVIGYSINDTIVTADRIRDISMKMQRFKTKEEIADAVNKALRQTFTRSINTILTVIFTVLALVLFGSESILNFSIALLVGLVSSVFSSIFMAMQLWYVFKARQLRKKGPISTVKKKKPRNNGQPVV

SEQ ID NO: 1347 - protein, 652 aa, Listeria monocytogenes
LKLSDITSEPLIFLDKDWRTKEEVFDGLIDALHNQGVLSDKNEFKKAVLEREKISETGLEKGFAIPHGKSKAVKKAAFAFARINQPINSWGSIDPTNEVKYIFLLAIPENEAGSTHLELLAALSKRLLDPAFIESISTAPTVNEFMTVLDSEQQEDEKVDYTRKIVAITACAAGIAHTYMAAEALELAGKELGIEVIVEKQGANGIEDRITPEILKGAEAVIFATDITAKDKERFAGMPFIQRRVAEPLRSGKEMIETVLSKPDGYVKADTDGSEQQFDNNKSSIFSQIYRGILTGISYMLPVIVAGGLMIGIGQLGATAFGLEKVIGNPEYATNSNQLIVIFHYLGLYGNMIMKFMYPVFGAFLAYSIADRPGLAPGFIGGAFAAGLHYTFWGVDGGIPSGFFGVLILGIIAGFVAKFLNEKIKLHKNLQAMKPMFLIPGITVLVLFFVNYYVVDPVFGGLNAWLQELIIQNQDASAVLLSTIIACLTAFDLGGPVNKAAGAIAIGLAADGIFPLTARVLAIVIPPIGLGLATVLDKYVVKRRVFDENLRVAGTTSIFLGFIAIGEGAIPFMLQNPLITIPINMIGASLGAVTAVLLGAVQWLPLPAIWGWPLVENFWAYAIGLIVGIAFITFANIFVRYGLITRKENKIK

SEQ ID NO: 1348 - protein, 96 aa, Listeria monocytogenes
MDRFSEWYEDLAPAISIKVEDFHILGYREIKASHIWAFLTEEKWKNGPTPALHERINDVMQMKIGQLMQFIMTTAEQESNNHVSQADSMLQPNVED

SEQ ID NO: 1349 - protein, 109 aa, Listeria monocytogenes
MGGIVTFIPIILMIVLFYFLLIRPQQKRQKEVQNMQSSLAKGDKIITIGGLHGIVEAIEDGTVILKCGNSKLTFDRNAIRTVLEKGNAVSNPVVAETTSDDTEVVEDNK

SEQ ID NO: 1350 - protein, 379 aa, Listeria monocytogenes
MSAIRYELIKTDKQTGARLGKIHTPHGTFDTPMFMPVGTLATVKTMSPEELKAMGAGIILSNTYHLWLRPGEELIREAGGLHKFMNWDQPILTDSGGFQVFSLSKMRDIKEEGVHFRNHLNGDKLFLSPEKAIQIQNALGSDIMMSFDECPPYPASHEYMKKSVERTSRWAERGLKAHVRPEDQGLFGIVQGGAYEDLRAQSAKDLVSLDFPGYSIGGLSVGEPKDVMNRVLEHTTPLLPANKPRYLMGVGSPDSLIDGVIRGVDMFDCVLPTRIARNGTCMTSSGRLVIKNAKFTHDFRPIDENCDCYTCKNYSRAYIRHLIRCEETFGIRLTTYHNLHFLLNLMKQVRGAIMEDRLADFREEFFEQYGFNRPDAKNF

SEQ ID NO: 1351 - protein, 342 aa, Listeria monocytogenes
MKVEDFDFDLPEELIAQTPLLDRTSSRLMVLDKESGDIKDQHFTDIISYLNEGDALVLNDTRVLPARLHGIKDETGAHIEVLLLKQKEGNAWETLVKPAKRIRKGATITFGDGALKATCLEELEHGGRILEFSYEGIFYEVLEQLGEMPLPPYIKEQLADQDRYQTVYAKENGSAAAPTAGLHFTEDLLEQISAKGVEIIFVTLHVGLGTFRPVDVEDTTNHKMHSEFYRLTEESAERINKIKAQGGKVVAVGTTSIRTLETIASRHDGKLVAESGWTEIFISPGYTFQAVDALITNFHLPKSTLIMLVSALSDRTKILAAYNHAVEEQYRFFSFGDAMFIH

SEQ ID NO: 1352 - protein, 335 aa, Listeria monocytogenes
MDERIISSETVDAEEVSFETSLRPQNLSQYIGQDKVKNNLTVFIEAATLRNEALDHVLLYGPPGLGKTTLAMVIASEMGSQIKTTSGPAIERPGDLATILTSLEPGDVLFIDEIHRLSRAIEEILYPAMEDYCLDIVIGTGPTARSVRLDLPPFTLIGATTRAGLLSAPLRDRFGVIDHLEFYTEEQLTEIVLRTSNILDTKIDDLGAREIARRSRGTPRIANRLLKRVRDFAQVRGNGTVTEKLAKEALTLLQVDPRGLDTIDQKLLHTIIQSFRGGPVGLDTIAASIGEERETIEDMQEPYLLQIGFLQRTPRGRIVTETAYNHLGISYEKEV

SEQ ID NO: 1353 - protein, 201 aa, Listeria monocytogenes
LYDYIKGTVTTITPEYIVVEAGQIGYQIITGNPFSFQRLEGTEAQVFLYQHVREDNISLFGFQTTEERYLFKKLLSVSGIGPKSALAIIASGDVVPLISAIESEDDVYLTKFPSVGKKTARQIILDLKGKLADVVASEIVYVAPENDMVAGLSPQLEEAVLALEALGYSTRELKKVIPKLAKEADLTSDAYIKLALQLMTK

SEQ ID NO: 1354 - protein, 311 aa, Listeria monocytogenes
MKPRKVMIIGAGNVGTAAAHAFVNQKFVEELILVDLNKERVEGNRKDLADAAAFMPGKMDITVRDASDCADVDIAVITVTAGPLKEGQTRLDELRSTSRIVSGIVPEMMKGGFNGIFLIATNPCDIITYQVWKLSGLPRERVLGTGVWLDTTRLRRLLAEKLDIAAQSIDAFILGEHGDSQFPVWSHSSIYGKPVNEYSLEKLGESLDLKQIGETARDTGFEIYHQKGCTEYGIGGTIVEICRHIFSGSQRALTVSCVLDGEYGESGLAIGVPAVLSQNGVKEIISLKLDEQEQQAFANSVSVIKKSIASI

SEQ ID NO: 1355 - protein, 241 aa, Listeria monocytogenes
MSGHSKWNNIQGRKNAQDSKRSKVFQKLAREIFVAAKKGPDPSLNPSLRLVMDKAKAVNMPNDNIKRAIDKASGNTSGENYDEVTYEGYAPGGIAVLVHALTDNKNRTSTNVRVAFNKNGGSLGETGSVSYMFDRKGYLVILREGLTVDEEEFMLEAIEAGADDVEVSEDVFEIFTDPATFSEVKEALQEAGYTFATAELSMFPTVYNEIAENNQTQFDKMLEALEDDDDVQEVYTNAEIN

SEQ ID NO: 1356 - protein, 882 aa, Listeria monocytogenes
MKKNKIVHVVAHSHWDHEWYFTMEDSNILLIENLDYLLNVLETKDSFASYSFDGQMSVIERYLDIRPENKARVQKLIQDRRLFVGPWYTQTDSLLVKTEAVIRNLLYGYKMGEEFGHSMSIGYSPDIFGQHAYLPAIYKSFNMEHSIFQRGVYNDQVQEDLNFHWTSPDNKSIPTNNIFFGYGPGKFLSSEKSYVETRLLPILDRLAEMNTHTDVLLLPAGGDQVLVRENFPEIVAELNEMDLGYTFILSDYEAFMNDAWTSTFPNEITGELLACQKSRIHHTCRSERYDIKRLNYLVENRLVNILEPLATMANKFGIKYPKPWLDIIWKKLFDSHAHNGIGASNSDDANHDIVVRLTSALRMTDGLINLLKKQITKAVSQEMGDENIALLFNTNPVPEERTAKLTLFTPEKSFQLFSGDKEVTFSVVHQEKLDGGRKVIVTAKGEKEVAVPDYYRTEIYLKTGPIPALGYTTLQVKAVAKEMDQLISISKQTIENEKIIVQFENGKINLLNKEQQSIINDLIRFENVADAGDSFDFSPLEGDQAIYIESSELLTVEKNHLYSKMMLKHTALVPKDLEARAQKTSTETVEILTEIELFDGEEFVRVRHTIDNKVKDHRIRALIKTNVAEPKFSYADQGYSLMKRSVTNPYLANWREDKFVEAPVPIFPVENIVAVSEEDATLALLVGGIKEYEILPKTAEIALTLFRSNGLLGKDDLMWRPGRASGINNKVVPTPDGQMLEEMIFEYAVYVQPEKLNEQTLYAQSNIFEGHTETYHLQNLNTFEERLERFEVDYPIDRLPAQNSIFELDNPNVFMSTCKKSWDGTGTIIRLFNPSDKEETVRWTTNASSFEVSLAEEKIAELKENTICIPKKGFATILLEGE

SEQ ID NO: 1357 - protein, 282 aa, Listeria monocytogenes
MKIAYLGPAASFTHSAAAKAFPKEEMIAKSTIPDCIMAIEKEDVDVAVVPIENTIEGSVNITLDYLFHFSSVPVVAEIVLPIAQHLMVHPAHVSAWKSVQKVMSHPQALAQCHTFLQAELYGVEREVTPSTAYAAKWVSNNPTELVAAIAPRMAANEYGLEIVKENAQDLELNQTRFFVLSRKPVSILLPKEEEKTSISVILPNNMPGALHKVLSTFAWRDIDLSKIESRPLKTSLGEYFFLIDVLSEGKEVLVTNALDEITLLGGTANKLGTYHVHRLQTN

SEQ ID NO: 1358 - protein, 429 aa, Listeria monocytogenes
MFVDQVKIYVKAGNGGDGMVAFRREKFVPNGGPAGGDGGKGADVVFVVDEGLRTLVDFRFKRIFKAEHGEHGMSKSMHGRGAEDLVVKVPQGTIVKDIDTGEIIADLVAHGQRAVIAKAGRGGRGNKRFATPANPAPELSENGEPGQERNVQLELKVLADVGLVGFPSVGKSTLLSVVSAARPKIAAYHFTTIVPNLGMVDAGDGRSFVMADLPGLIEGASQGVGLGHQFLRHIERTRVIVHVIDMSGSEGRVPYEDYMAINNELEQYNLRLMERPQIIVANKMDMPDAEENLNEFKTKIAEDIPVFPISAVTKTGLRELLLAIADKLETTPEFPLNEILEQEDEDTVLYKYVAEEPDFEISREPDGTFVLSGAKIERLFTMTNFERDASISRFARQLRAMGVDEALRKRGAKDGDIVRLLDYEFEFMD

SEQ ID NO: 1359 - protein, 497 aa, Listeria monocytogenes
MEKKYILALDQGTTSSRAMIIDEEGEVIGVAQEEFDQIFPKPGWVEHNANEIWASILAVIAGVLLKTNISSKEIAGIGITNQRETTVIWDKESGNPIYNAIVWQSRQTEDICKQLRKDGYEDTIRSKTGLLIDPYFAGTKARWILDHVDGAQERAEKGELLFGTIDTWLVWKLTGGRAHITDYSNASRTLLYNIYDLEWDDELLKMLNIPKAMLPEVRPSSEVYADTVPYHFFGEEVPVAGIAGDQQAALFGQGCFEKGMAKNTYGTGCFLLMNTGEKAVRSENGLLTTLAWGIDGKVEYALEGSIFVAGSAIQWLRDGLRMVRQSSDSENYASRIESSDGVYVVPAFVGLGAPYWDSDVRGAVFGLTRGTEKEQFIRATLESLAYQTRDVLYAMEQDSGISLKTLRVDGGASANNFLMQFQSDILGVPVERPENKETTVLGAAFLAGLAVGVWKDKNEIKKHWKLDKRFEVEMKEEQREDLYEGWHKAVKAAQAFK

SEQ ID NO: 1360 - protein, 272 aa, Listeria monocytogenes
MIDTSLATQFLGEVIGTAILIILGAGVVAGVSLKRSKAENGGWVVITLAWGLGVTMGVYVSGYMSMAHLNPAVTIGMALAGAFPWNYVLPYILAQFIGAFIGATLIWLHYYPHWKQTEDKPTKLGVFATAPAIRHFTSNFFGEALGTFILVFGLLSLGANSFSDGLNPLVVGALIVAIGMSLGGTTGYAINPARDLGPRIAHFVWPISGKGGSDWGYSWVPVIGPIMGGALGALGYNAIINGELGMWFWVFAVLFVLILILTMQLDKKKDLA

SEQ ID NO: 1361 - protein, 390 aa, Listeria monocytogenes
VKGSFTKFKQFFIENKFVLGLLIFLLVALDIYVLTKIAFIFDPLMVILKTVAAPIILAGISYYLFNPIIDWLEKHKWKRGWAIALLYLVIIGLLILLFSFVIPAVKDQIVSLFKSFPGYWDQITQKFDEFSRSSLFDQLKDKLNTNMSDIMKTLSTKGTSVINSAISSIGSIVGTVTEVVLAIVTTPLVLFYLLKDGKKLPDFLLKMLPVNGRAHTRQVLGEANHQISSYIRGQIIVSLCIGILLFIGYLIIGLPYALTLAIIAACTSIVPYLGPAIAITPAIIIAIVTSPWLLIKLIIVWCVVQLLEGKFISPQVMGKTLKVHPITILFVILVAGNLFGVLGVIFAVPGYAVLKVIVTHVFIWFKRISGLYGEQPESEYVETPTEEKEL

SEQ ID NO: 1362 - protein, 560 aa, Listeria monocytogenes
MQTELVNQIEVKLRKIYQAAYQPAYLEKMLACAENYSNNTRGSIDTISEKNVYLIAYGDSIFEKNKHPLQTLNEFLQEYAQDAITDVHLLPIFPSTSDDGFSVTDYKQIDEQLGDWDDVQKMSENFRVMLDFVANHMSKSSDWFKRFSDNEAPYNQFFIEKDSQFDYKNVTRPRTSPLFHKYENGKELWTTFSEDQLDLNVRNIDCLVALTDVLLFYASKQATSIRLDAIGFLWKTSGTTCMHLPETHEIISLWRLLIDELYPNLQIITETNVPHEENISYFGDGKNEANMVYQFPLPPLVLHTFTCHDTTKLSKWAKSISQVSDTATYFNFLASHDGIGMRPATGILSDEEINSLVQKAVQNGGQVSYKDNADGTQSVYELNINYGEALQNLDEDTTEELVTKKIIAAHSILLTLQGVPAIYYHSLLGSKNDLVGYEESGINRRINREKLEKNQLVHELKTDTYRKTIFTSLKKLVQIRRNHTAFSPFATQEILDLGPDVFAIKRESEGECIYGIINVTSHDISKKVAFSGTNLLANQPVTSELELTAYEVVWIKKAVQ

SEQ ID NO: 1363 - protein, 776 aa, Listeria monocytogenes
MRQNYDDRKIVKQYREIARQIVKKEGLYKNMEQAELCEQTNFWREKFKTKPMTDRDKINIFALAREAASRIIGLDAVVVQLIGALVLGDGKVAEMKTGEGKTLMSLFVMFIEVMRGNRVHLVTANEYLARRDREEIGQVLEYLGVSVALNESGLDIAQKKAIYTADVIYGTASEFGFDYLRDNMVRQKEDKVQSGLDFVLIDEADSILIDEARTPLLISDRKEEDLSLYHTANKLVKKMMKDDYEMEEHKRFVWLNDAGIEKAQKFWGVESLYSAEAQSELRITMLLMRAHFLMHKDKDYVVLDDEVLIIDPHTGRALPGRRFNDGLHQAIEAKEGVEVKEESRTLATITIQNYFRMYKKISGMTGTAKTEEEEFRQIYNMDVVVIPTNLRVNREDMQDDIFYTKKEKGRAIVYEVSWRYEKGQPTLIGTSSIKSNEWISGLLDAAGIPHQVLNAKNHAQEAEIIAKAGKRGMVTLATNMAGRGTDIKLDPDVHKLGGLAVIGTERHESRRIDLQLMGRSGRRGDPGFSKFMISLEDDLLEQFESKSWEKLSAKLKRKAPRDGKPVNSRKIHAVVVDAQKRLEGANYDIRKDLLSYDEVIDLQRKMVYKERDLLLERNKLGVSSEKILREVAEYSFIHPSDIPEEELEIYYSRQKELLGGTKFPISFDQVTLMEPREVVEEIVSWHKKERNKFPAETIAAIEREVYLNLMDQMWVMHLDAMVQLREGIHLRAYGQQDPLVMYQKEGAQLFEKFQADYHFYFAHALLELDPDGLIQG

SEQ ID NO: 1364 - protein, 482 aa, Listeria monocytogenes
MKKATIAATAGIAVTAFAAPTIASASTVVVEAGDTLWGIAQSKGTTVDAIKKANNLTTDKIVPGQKLQVNNEVAAAEKTEKSVSATWLNVRSGAGVDNSIITSIKGGTKVTVETTESNGWHKITYNDGKTGFVNGKYLTDKAVSTPVAPTQEVKKETTTQQAAPAAETKTEVKQTTQATTPAPKVAETKETPVVDQNATTHAVKSGDTIWALSVKYGVSVQDIMSWNNLSSSSIYVGQKLAIKQTANTATPKAEVKTEAPAAEKQAAPVVKENTNTNTATTEKKETATQQQTAPKAPTEAAKPAPAPSTNTNANKTNTNTNTNTNTNNTNTNTPSKNTNTNSNTNTNTNSNTNANQGSSNNNSNSSASAIIAEAQKHLGKAYSWGGNGPTTFDCSGYTKYVFAKAGISLPRTSGAQYASTTRISESQAKPGDLVFFDYGSGISHVGIYVGNGQMINAQDNGVKYDNIHGSGWGKYLVGFGRV

SEQ ID NO: 1365 - protein, 394 aa, Listeria monocytogenes
MKNLVKVKVFPKFTKGYKEGYPLILKERMEKWPKELQEGDVLELTDTNGQFIARGYHGEQNKGSGWLFTWDKKQQLDEDFLTNLITTAIEKRQFLFADDSTTAFRIFNGEGDGLGGFTVDFYDGYLVIQWYSLGIYAFQKMIIDIFLSFPEIKGIYEKRRFQEDTKDDFVAGQKATFPLIIKENGINYATYLDDGWMTGIFLDQRDVRRRISEDYSVSKNVLNTFSYTGAFSVAALFGGASKTTSVDVAGRSLSKTKEQLEVNGLDPNEQAIIVEDVFHYFKYAARKQLTFDLVVVDPPSFARTKKVTFRAAKDYPAMLREIIDITAPNGTIIASTNYAGFGMKAFKKLIAEAFQTSDRTYKIVETHSLPTDFTVNKNFPEGNYLKVLFLTLDI

SEQ ID NO: 1366 - protein, 218 aa, Listeria monocytogenes
MFAYDIYEPIGRKDEDTFPVIFALHGFGGDELEMAGRLELLMDRFVVVSMRGDVEYGPAYGFYHMVTEGDPNPREVDYISLRVAQFIDKICTDYISIDKEQVFLAGFDQGAVLAISIMQSYGGQYKAAALLSGRLPYYMEERPANLMLKDKRIFIGHGIEDAVIQISEADDIARLFEKMGCQVEKHRYFIGHNVNEAEEDDLYRWFESFLPNQPVKNK

SEQ ID NO: 1367 - protein, 377 aa, Listeria monocytogenes
MKIVIAPDSFKESATAVEVATAIKKGWTKARPADQISLAPVSDGGEGFLTVLSESSEVELFQAEVTNLNGHKIMASYGIHARQETAIIESANTIGLDLIPAADRNPAHASSAGVGELILASLDHNVKKIIIGLGGSGTNDGGAGLIQALGVALLDKNKQPIPPGGIHLQELAYIDASNLNPKLKNIQFQIACDVTNPLLGENGATFVFGAQKGASPDMLVKLENAMQNYGAKLDQFSSQKITTKKGAGAAGGIAAGLMTFLNADLLSGSTLVMELSNMKDKMKDADIVIVGEGRMDKQSMMGKIPVQIAQEAKKQGCFVLAIVGSLALENNLAQQHGIDAFFPNIPEITDLPTLFENTTKNLERTAENIAKLTLIGK

SEQ ID NO: 1368 - protein, 250 aa, Listeria monocytogenes
MSNETTDYLLETCLMAGKIMMESGAEMYRVEDTMNRIATVASNKKGISFVTPTGLFMSLEGERNVQLQQIPTRTINLEKVSMVNEFSRDFAEKRISLKELHTKLVNLDKDVRYFPIWLQIIAASLVSGSLMVIFGGGWFDFIPTCIIGAIGFIIFYYTQIFMKVKFLAEFLASLSVGLLAVLTISIGWGINLDTMIIGGVMPLVPGVPITNAVRDLIAGHLLSGMARGTEALLTSCAIGIGIAVVFRFFL

SEQ ID NO: 1369 - protein, 152 aa, Listeria monocytogenes
MDLVWTIIIQLVLSYVATVTFAIITNVPKRALNACGITGTFGWMAYWTLMQMDSGTGASSLAGAFVVAILSHFFAKHKKMPITIFNVPGIVPLVPGGLAYQAVRNFVLGDYTEAIGFSVQVTVVAGAIAAGLMLSEVFNHSIRAFRGRKERI

SEQ ID NO: 1370 - protein, 487 aa, Listeria monocytogenes
MKKKYFLCVFAVILFFTGFLFGNSPVNAAETDTSNVTYNYIDISTLTETQKNSIIKGNPNETLTNDYENYSFVYQKNTSEPTTNTDNTSDNNKNQNGTLLKAGDVGPNSYLIILGFILIGSGIGLLTLKKRYARQLLVFLVVLGGSSLLVGSIVQATENSNLKTQESQTVAKGTKETKQPESMEGYTYVGYIHTSKNNTPPVVEKGTVTVNYQDEQGNSLATSETLKGDIGQPYQTATKNIEGYQLKEVNGNTTGTFTEKAQVVTYVYQKVPVATVTVKYLDQDGNKIHDPQTISGNIGEPYDASTDKYKLQIDGYTLDTTKLPNNANGIFTNQAIEVTYIYTKEAQDVKITIKFVDSNGDPFVLTDLTTYKNGDLVPIYPNLDQYHMRLNYNQQIYNQGEAVPDIVIPAKEGETYLLPERMTFNILDDQGKQIPYVISQNADFSSTGIERWENYQSIPTNREGTLTSEDVVVTYQILVYGVLIPEP

SEQ ID NO: 1371 - protein, 242 aa, Listeria monocytogenes
VAQNQTKYSFIAEEIRKRIMNHAYPLNQPIPDEITLAKEFDCSRMTMKKALEVLVLEGLLYRKRGHGTFIIKSALDADRLQIHNQEVNGFTKLLNGKKVISKVIEFKVIFPTEEIAERLHIEMETPIYDILRVRLVKDEPYVLEHTYMPVGVIPGINQQILEGSIYSYIQDDLNLKIASSYKQIRADKATLLDQQYLDCASDDPVVEVEQTVYLNNGLAFEFSRSRHRYDKFVFTTVNIARR

SEQ ID NO: 1372 - protein, 430 aa, Listeria monocytogenes
MFQLKANGTDVKTEVISGFTTFLTMVYIVVVNPAILSAAGVPFNTVFMATIISAVIGTLWMAIFANYPIAIAPGLGMNAYFVTVVTTQKLDYSVAFAAVFVAGIIFLLLSLTPLREKIIEAIPHNLKAGITAGIGLFIAFLGFRMTGIIVSNDSNLVGLGDLHSKEAILAIVGLLITLILLALNVKGALFIGMIATGIIAFITGELKFTDGIVKLPPMPEFVFTNPIHAFGDVMSYGLYAVVLSFLLITIFDTTGTMIGVAKKAGLMKGESLPNAKQALMADAVATSVGSMFGTTPTSAYIESSAGVATGGRTGLTTLTVAILFMVSAFFAPLVGAVSGISAITAPALIVVGSMMIGAVKEIDWDTLDEAFPAFLVILAMPLTSSIAIGLAFGFISYPVLKVFTGKWRELNWFLIVIAVLFFILVAFLPH

SEQ ID NO: 1373 - protein, 88 aa, Listeria monocytogenes
VFLKSLLAGVALAVVVFLASFLMPDYTVSTLYSIVTTIIVFASIILSAFVSFGGRSGNPSRKSQLRWSILLLVAAIPSFIGFIVTFYF

SEQ ID NO: 1374 - protein, 318 aa, Listeria monocytogenes
MPNIKEIAKLAGVSVTTVSRVLNNHPYVAEEKRVRVQAVIDELDYSPNRSAMDLARGKTNTVGVIIPYNDHPWFDKIVNGILEVAFKNRYSVTLFPTGYDPKEEEKYLMRLKTKQVDGLIITSRANNWDVILPYLAYGPIIACEYVESKEVSCSYIDRVKAYRAGFQFLEDEGYKKVAFTAGRASRESTSTYGKINAYEQVFGPVGDNRFLSECYTLEDGLKAGEHFFAAGKDWPDAIYANGDEVAAGVMYHVKKLGLRVPEDVAILGQENLPIGKVLEITTLDHNLKKLGENAFTIFEQGKLQRIKVEHELIRRKTV

SEQ ID NO: 1375 - protein, 173 aa, Listeria monocytogenes
MTLKGKKVIALVSEDFEDLELWYPVLRLREAGASVHLVAEEAKKVYHGKYGVPVTSDYDFDSVRAEDYDGILVPGGWSPDKLRRFDSVLNLVRAFDKAKKPIGQICHAGWVLVSAGILEGVNVTSTPGIKDDMTNAGAIWHNEPVVTDGHIISSRRPPDLPEYLPAFISALED

SEQ ID NO: 1376 - protein, 114 aa, Listeria monocytogenes
LKGTFNGFLFICNIVIFIQKTTIIVRQFSSFLSSSQKIYIYLLAFFKNNSKISYRIEFYLDESFIFTNVIFMGIRPYHGYNDFWCIHLPIEWQLVRHLFRHQNHYLFSFISLAV

SEQ ID NO: 1377 - protein, 116 aa, Listeria monocytogenes
MEIQVEEAVVKLILHGGNTRKEAYKAIDFAEKYQFDEADKHLQIAQDQFQEGHIWQTKLVSIRDSETVAHPSFLLIHGQDHLMTAQAELQLAKRIIEQYKHQQRLEERLTKLENQA

SEQ ID NO: 1378 - protein, 291 aa, Listeria monocytogenes
MNYEMISDYKDNKMYRDSFNRLAESTFDINFEEWYRDGFWNDKYICYSYIDDNKVIANVSINKMNLIYQGEDYRALQIGTVMTHPDYRGQGLAKKLLEHVIAKYEDQYDFLYLFANDTVLDFYPKFGFERVEESSFTVDACSLKRESSNLKKLNPGNKTDFQLISRIVSEKTPLSNILDVRESEDLLMFYVLIALKNELYYIEELDVIVLMEQEDADLYVLDILSTKKLDVVEVLRYLPIKKIETIHLLFTPEKSKYIDAAHIIETEDMLFVRPNILTNENYFLFPATSHA

SEQ ID NO: 1379 - protein, 102 aa, Listeria monocytogenes
MDEQLKENLMGALEQVIDPELGIDIVNIGLVYDVELDDDGLCTVSMTLTTMGCPLAGILTEQVQMALSDIPEVKDTNVNLVWNPPWTKDRMSRYAKIALGIR

SEQ ID NO: 1380 - protein, 250 aa, Listeria monocytogenes
MIQVENEQIAGIPVLHISNSENADKMLPTIIFYHGFTSQKELYLHYGYLLAQRGFRVILPDAKLHGERLQGANPEDQATFFWDVIETNITEFPLITDELIKAGKTDANRIGVGGVSMGAITSLGLLGLYENIKVAVSLMGSAYYVDFAKELSKYALAQGLTFPFDVDERILALQKYDLTQNITKINNRPLLLWHGKKDDVVPFAYSEKLYQTLVEESLADNVQFIIDDNAKHKVSVEGMLQGVSFFEKFL

SEQ ID NO: 1381 - protein, 281 aa, Listeria monocytogenes
LNQTYELKEQTMSKKLIVLDLDGTTLRDDLTISSHTKNTLEKARMAGHEVMIATGRPYRISGSYYHELGLTTPIVNFNGAVYHHPRLTTFAEGYHHAIDLQVVHELLDFSNGFSLDNIAAEVQDNVFLKERNNSVPETFHLGTENIVFGNIRDAIKSDATSLLFFGKLDQLDLISKHLDESLSGVISHHTWGASAWPAVEIIKFGIHKAIGVQAAAKTLGFDRKDIIAFGDETNDLQMLDYAGVGVAMGNAAESVKNVANVVTASNQDDGIAVYLEENLNL

SEQ ID NO: 1382 - protein, 300 aa, Listeria monocytogenes
MSSKIVYKEYAKKTAIAIIAALLNAIGMNFFLIPAQVYAAGLNGVAQLGSDMLRDSMNISISTGLLVLLLNIPVAILGWLKVGKSFTVFSFLTVAFMSFFLIVIPEVQVSNDILLNAIFGALIASVGIGLALKFGISTGGLDIVAMYITIKTGRSFGKYFLLLNGVIIIVAGFAYDWTFALYTLISLYVQSRVIDIIHTRHQKLTVMIMTQHSETVIKAIHENMVRGITVVDAMGGYSKEDVAMLIMVITRYELYDITHIVGEFDSKAFINVMETSSVFGDFRSEADQKLAMAMYKNKMM

SEQ ID NO: 1383 - protein, 120 aa, Listeria monocytogenes
MWGYIHLISWVAIVVLTITALLIYSKSTKSFTMLQMINRVFYILVILSGIMMVKYSIEQSWILAIFKILMGIIVIGVVEMLLSYRKQQKPTGMFLMIFVIVVVITISLGFYLSGGYPLFN

SEQ ID NO: 1384 - protein, 282 aa, Listeria monocytogenes
MKWLSYLYEGDLAYGILTPENKIIPAGTIFSNPPATLLDFIKEKPLVPELTGIDGHIDLAEVEIQVPFVPPNNIIAIGKNYYNHVLEMGSKEDVPEHILVFTKSANSLLPHNGNIELHQNITGQLDYEGELAVIIGEKVRDISEQEALSAIFGFTILNDITARDLQKKHKQFYLGKSLDASCPIGPFVLENNANKEPVFHIETKVNGEVRQSDSTDKFIFGLARIISDLSKGHTLLPGDIIATGTPSGVGNGMTPPTFLQDGDIIEITIDKIGTLTNKVRKS

SEQ ID NO: 1385 - protein, 1235 aa, Listeria monocytogenes
MSLNIPPKPEESLWTDDQWKAIQAKGNNVLVAAAAGSGKTAVLVTRIIEKLIDESANLNVDELLIVTFTNASAAEMKFRIGKGLEEALGQNPDSAHLKRQVALLNYASISTLHSFCLEIIRKYYFEADIDPSFRLIEPIESSMIRDEVLEGLLEQEYGIENNEAFFHLVESFTGDRSDAELHSLISKLYDFSRANPDPNAWLEAMVNFYNTEEITSITELPYFPIIKEDIELRVNQAKNYLLNAINYANENNGPAPYLATLENDLVQIQALSELNWSSWTHLKTSIENIDFKRIPTLKNKSDYDEVYVEEAKKFRDAAKKEMKNIATDWFSREEVNCLSDLEKMKPDIQTLSELVKKFSANFFEEKQQRGVLDFNDLEHLALKILLNDDKASEVAQNYQKQFKEVLIDEYQDTNMVQETILRLVTNPSEAQGNLFMVGDVKQSIYRFRLAEPTLFMTKYQTFQQDGSGNGIRIDLSQNFRSRKEVLDATNFIFRQLMDKHIAEIDYDTAAELTLGANFPETNAMETELLLIDMKTEDTETEDELSPQELQKNQVESRAIAMKIREMIDNKFPIYDKKLKQNRPIQYRDIIILSRAMTSAPDMEEAMKVQDIPFYANNNSGYFETTEVATMIALMKVVDNPYQDIPLAAVLRSPIIGLNEEELGQIRMAKKKGYFYDALLTYKDITVSETANKISDFVQQLNNWRELSIRENLTSLIWQIYQETNFYEFVGGLPGGKQRQANLRALYDRANQYEKTSFRGLFRFVRFVERLEIRGDDLGTAKTLGEKEDVVRMMTIHASKGLEFPVVIVSGLSRKFNMRDIYSKTLLDKDYGFASSYRDVEKMIVYPTIMQQAIKQKKSREMIAEEMRVLYVALTRAEEKLILVATVPDFEKTSKNWLQVAKEKETILPAATRAKAKCYLDWIGNATIRHPAFKELLCEEIIQTLATEMKLQIEIKTKEMFLTNELERAESDNWLENIKEHQPVPIQSPYKDEIQRYMEYEYQNEAATEIRAKQSVTELKRQFSLQDSWSDTTLLKEFQKVSLDRPKFLQKNKLSATEIGTAMHTLMQAVSLDYKPTKEDLEQLLHTMREKDILTDVQIKAINIKQILDFFESPLGETMLQKKDLVKREVPFSYLLPVSELYEKVDLDERVLIQGVVDSMIEEEETITLIDYKTDKIEGRYADWNAAEKVMKERYHIQIKLYAEAIQAISGKKVAAAYLYFFDGQHICQINTKEGL

SEQ ID NO: 1386 - protein, 1157 aa, Listeria monocytogenes
MTLQIIAGRSGTGKTTHLMDEVGEKIKQNSKTYIFIVPDQMTFQMETSFLNKENLAGMLGTQIFSFSRLAWKILQETGGLSKTFLSQTGIEMVIRKAALDQKDKLKIFSRATSRKGFYSELANLFKEMKQEEVSIEDMVKSATNLSTSVNNKVHDISLIYQKYEELLADKFLENEDYLRLLAEKIADSDYLNQTEIVIDGFTSFSKQELTVIGELMRKCDKVTISLTLNVPEIQHGLDEYSMFKASTEAYYALLELAKLNGTQVEENKFFLENKRAKTESLAFLANTWGHNKFMSFKNEPQNLKIHQANNRRAEIEGIAREIRQQALNGYRYRDIAILTRNLGDYDVLCETVMEAYNIPTFIDKKRAMAKHPFIEFIRSSLDAILFNWKYEPIFQAVKTEFFFDITEKSSLNRRKADILENYVLENGIQNKWKWEKEGDWIYRKIRGLSTNVLPQTDEEIHMQSIINEMRNLIVNPLSTLELNLRKAKTGMEFALALYHYLEQVNAVERLESWRQRAEEQGYLELAREHEQAWSSISALLDEFVEVLGEETLDLDSFTEIIGTGLDALEFSLLPPSLDQVVLSDMENAKLLDMKVIFAIGMNDGVMPLRQKDKGIFSDQDRDALRAEDSKLKPSAKNNIGEEDLLAYKIISLPSDKLFLSYPAADEEGKVLSESNYLRKIKGQFNELNESVYLTDPSLLSDAEQSSYIRSKQATLGLLTSQLQMYKRGYTLSSVWWDAYNSYFENEKESIMAKQVLSSLYYENKTKPLQETTAKNLFGETIHASVSRMEKFFSCEFQHYAQYGLKLEERGHFQLQAVDMGEIFHGAMEWISAELKRNNLDWGNLTEEECKQMAKLAMTFLAPKIQHEILLSSKRMEYIQYKLLQIITRATTVLNEQAKSSAFRPVGLEVDFGLKGDIPPLKIPLQSDSELLLQGRIDRIDMAEQDDRTFLRIIDYKSSSHDLALTEVYYGLALQMLTYLDIVVTNAQKMIGKTAEPAGVLYFHMHNQYVQAEKELSDEAIAKELQKSSKMKGLILSDPVAVSLMDMTLEKGKASTIIPAEIKQNGELSARSRTATRAEFDKMRQFVRHKYQEAGNKILDGAVSINPYKLKERTPCQFCSFRSFCGFDPSLTSNQYRHLANEKAETILTKMDIEGGTQ

SEQ ID NO: 1387 - protein, 921 aa, Listeria monocytogenes
MEYKDTLLMPKTDFPMRGNLPNKEPEWQAKWEEEKLYEKIQEKNAGRPTYILHDGPPYANGELHMGHALNKTIKDIIVRYKSMAGFSSPYVPGWDTHGLPIETAIAKKGVKRKEMSIAEFRKLCAEYAMKQVDGQRTGFKRLGINGDWENPYITLLPEYEAEQIKVFGEMAKKGYIYKGKKPVYWSPSSESALAEAEIEYQDKTSASIFVAFKVTDGKGVLDEGTNIVIWTTTPWTIPANMGITVNPDLDYVVIESAGEKYVVAEALLPSLREKLGFEDATVVKTVRGSELDRVVTKHPFYDRDSLVMNGEHATAEAGTGAVHTAPGHGEDDFLIGKKYDLEILAPLDDRGVFTEEAPGFEGVFYDTANKMVTEKLEEVGALLKMEFITHSYPHDWRTKKPVIFRATAQWFASIDAFRDDLLAAVKGVNWTPAWGETRLFNMVRDRGDWVISRQRAWGVPLPIFYAENGEAIITDETINHISELFREHGSNVWFERDVKDLLPAGFTHPGSPNGEFTKETDIMDVWFDSGSSHQAVLNARPELSRPADLYMEGSDQYRGWFNSSLTTAVAITGEAPYRNVLSHGFALDGEGRKMSKSLGNTLLPGKVIKQLGADIVRLWVASVDYQADVRVSDEILKQVSEVYRKIRNTMRFLLGNINDFNPTTNTVSYENLREVDKYMLIKLNDLVKNVKDSYEAFEFSTIYHQINNFCTVELSQFYMDFAKDVVYIEAADSHDRRAMQTVFYEAVVTLTKLLAPILPHTTEEVWNSLIGEGAESIHLQDLPDVKVLANSEEITAKWDAFMQIRDNVQKALEFARNEKLIGKSMLAKVTLYVDGEAKTLFDSLEGDFAQLFIVSDFELVEGLENAPESAFKSNQVAVQITVAEGETCERCRVVKKDVGVNPKHPTLCGRCADIVVKHYEA

SEQ ID NO: 1388 - protein, 329 aa, Listeria monocytogenes
MATIHFTKVHGSQNDFFLVDEEGNQIMDWSDAKRADFAIKLCDREHSLGGADGILYVTKSSEAGPIGQMRVVNSDGSIASMCGNGLRTVARYLLEKHALTEAKVETMKAILDVKKATSLGFDIPTYQVEISPVKFNAESLPMNVGVEKLFNQVVPELDAELAFSAVSVPNPHLITFVDQTVLDSDRQETLASYLNSENPYFPDGVNVSFVKRLSDDAIYVRTFERGVGFTNACGTAMSACSLIKKMLDKDTFETPLNVYNDGGRVQVTAKKDEAGDISLQLIGNATFVSTGSVSYESDTVTELTNEATPEQAQYQELVKEVKEFLKTTE

SEQ ID NO: 1389 - protein, 231 aa, Listeria monocytogenes
MNTNRKKATPLFVIGGFCLILFITIASAIATESNWVARFDLSWIEKIRSGIQPDKTAIVKFLTTLGSAETTIILTIVVVLILFFLRKFVVGLWFGGTMLVCGVVLNLVLKSLVGRTRPASVNWLVSESGFSFPSGHATATAVFYGLAAMFLIFTVPKMWQKIVIGIIGYGFILFVMYTRVYLGVHFPTDVLGGFFLGTASVFISLGVYFLVRKPLHNLLVKWRIKDKSITE

SEQ ID NO: 1390 - protein, 444 aa, Listeria monocytogenes
MNPDPESQQIILQLILIVVLTMLNAFFASAEMALVSLNKNRVKSQAETGDKKAVMLAKLVDDPSKFLATIQVGITLAGFFSSASAATSIATRLESVFGGSSFAKELSIIVVTIVLSYITLVFGELYPKRLALQKSEKIARVSVRPIMAVGVVLRPFVKFLSFSTDILVKLTRMEKNTDNEKMTREEMQLLIETGRRDGVIEVEELQMLRGVFEMDNKYAREVMVPRTDAFMIDAETESEELCDALLSENFSRVPVYTGDQDSVRGILHMKDFFAEARKSGFENIDVKGLVKDAYFAQETMFIDDLLKNMQRTRNQMAILMDEYGGVAGIVTVEDLLEEIVGEIDDENDVFSDEVKKVDETTFIVEGRMPLDDFNKMFHVELPSRGVDTVAGFVLTLTGTIPEEDDKVVVEYGTLRFTVEEMNDARLVSVRVEKDIQTSELGQMA

SEQ ID NO: 1391 - protein, 1036 aa, Listeria monocytogenes
MSIHMFFTKDKLRGRLDEVALYRYEKTYPIRNFQTAEDMDGEIAARPDNILYDNELTIGENWSGRDRYVWLKTTITFPDTKTGTRLIGYFDFGNTGDGHNSGFESLLFVNGEPYQGVDQNHREVLFPDSFAGKTIELVFRLWSGLEGGGTPTIQTHQLKEAFIGYLNLMIDDLYFTSKATLKTLDQLEEKNPTYAPLLQAINRAYLAIDWSTPGSIQNLISMETANQNLQAALKKIPKNFPIKVAAVGHTHIDVAWLWRLKHTREKAARSFSTVLHLMEDYPEYLFLQSQPQLYAYIKEDYPEIYAKIKAKISEGNWEADGGMWLEADCNIPSGESLVRQMLYGQKFLREEFGKPSSFLWLPDVFGYSWALPQILRKSGIKTFMTTKISWNQYNRMPHDTFQWRGMDGTEILTHFITAPEKNSRISTYNGKMTARELVGLWDKYQDKEVNQELLLAYGYGDGGGGVNREMLEMRRRYDAMPGIPEVKPKSATTYFNDLHETINATDQYVHTWNGELYFEYHRGTYTSQAFTKKMNRKIELGLRNSEWLSVLANLKQGITYPTEKLAGIWQILLRNQFHDIIPGSSIKEVYDDALIEYTEAMTENNVLISKQLASLTRAAEEKITLWNSSTWTRPRYIEISPENPADHLAFYDENNILLPAQKLVNNTWLIQHPNLPVLGAATISVKETPNILGQSSFNYNNKQLETPFYQIKWNEVGQFTSIFDKKNNRQVLAENTRGNVFQLFEDKPMWHDAWDIDLFYQEKQNEITALDSVEITEKGPLQFTMKQVLHSEKSQITQWIHFYHESPEIRFETEVDWRDRNQLLKVAFPVDVHASEASYDIQFGNVKRPTHWNTSWDYARFETVGHQWADLSEKNYGVSLLNDSKYGYDIKDSTIRLTLLKAAGYPDPDADLGIHQFTYSLYPHQGDFLDGETVQAAWELNNPIFTSNGEIETFSLFQVTNPYVMIDSVKQAEDGNGFILRLHEFAGTHGEVTFNSDYTITSITECNLLEENETSLPTPTFTIAPFEIKTYRIHLA

SEQ ID NO: 1392 - protein, 285 aa, Listeria monocytogenes
MIIKKILNNNVVIAEGKSGKESVVMGRGLAFQKKIGDEVEVANIEKTFVMETHELSEKLSELLSEIPLKHLRVADDVVQYAQETLETDLSDNIYLTLTDHINFAVSRYNQGINLKNALLWEIKRFYHAEYLVGMKALDFIEQEVGIRLDEDEAGFIALHIVNARQDGQQMHMTVAMTQIVQDILSIVTYHYGMVLDETSLNYTRFITHLQYFAQRLLRKEIVDSGDDFLYEQVQIKYPEAFKCTKKIDAYLINTHHTELTRDERVYLTIHIYRVTERNTIIKEEE

SEQ ID NO: 1393 - protein, 101 aa, Listeria monocytogenes
MFDLIFPLLLIILGVIYRINPPKNKESRFSYRTKASLKNEISWQKAHQSLGFYWIVIGVSLLVLSLVLAFIPMHAFVRSSILLTTSIFAVLLSVILVEKKL

SEQ ID NO: 1394 - protein, 467 aa, Listeria monocytogenes
MLYSEDDKRKQESYRIPLFGSEEESTSIPKYVLKKEPMEPRIAYQLVKDQLMDEGNARQNLATFCQTYMEKEAEILMAETLEKNAIDKSEYPQTAELENRCVNILADLWNAPKDMSYLGTSTVGSSEACMLGGLAMKFRWRNNAEKRGLDIQAKRPNLIISSGYQVCWEKFCVYWDVDMRVVPMDKNHLSLDVDKVFDLVDEYTIGVVGILGITYTGKFDDIQLLDEKVEAYNETNEHQLVIHIDGASGAMFTPFVNPELPWDFRLKNVVSINTSGHKYGLVYPGVGWILWKDKEYLPKELIFEVSYLGGSMPTMAINFSRSASQIIGQYYNFLRYGFEGYREIHEKTKKTAIYLAKTVEKSGYFEIINDGANLPIVCYKMKEGLDVEWTLYDLADQLLMKGWQVPAYPLPADLSDTIIQRFVCRADLGYNVAEEFAADFADAIHNLEHARVLYHDKERNDSYGFTH

SEQ ID NO: 1395 - protein, 252 aa, Listeria monocytogenes
LAILELNFKSVCLAMQTSVTVILPETDALYHGSIPKYKTLYILHGLSNNHTTYVRNTNIERYATEKGLAVIMPAADHSFYSNMVHGRDFFEFVSTELPHVMKNWFPLSDKKEDTFIAGHSMGGYGAFKVALTFPEKFQAAASMSGVMDINYIIKEDCFENFSTRAITGEMASQTGTENDLFHLLETNLQNQVPLPALFQNCGTEDFLYEDNLRFRDFALEKNAPLEYREGPGDHDWEFWDKSIKEIINWLPL

SEQ ID NO: 1396 - protein, 323 aa, Listeria monocytogenes
MKKITILMLSITAALLLASCGNDTTTDMNNETTKTENKSQAALTITDMAGRDVSFDKKPERIIALTNADMNIIYALGGTVVGRQTTDASGVPDGAKKATEVGNTHDLNLEKIASLGADAIVASSEQNLKDVPAMEGVGPKVVLTGANSIDEIKKQTAVLGKLLGKETKAKELEANIDQKVAEVKKKQQGKKVRSLLVLGAPGSNYAALPSSLSGNVLEIAGGENVAKDFKGVENFPQYASMNVEKIVAADPEVIFLMIHGGDEKETEAAFKKEMKQNEAWNSTSAVKNDHIVVLPAELFGTNPGIKIDQALDYMTDEINKVDN

SEQ ID NO: 1397 - protein, 336 aa, Listeria monocytogenes
MTTVKAHDPRRKRRRITFIVVIVLLILAFFYGLTTGSVKVTYSDAWQTLTGGGSDLANQLIWNLRLPRLLIAFLVGAALAIAGCLLQGVMRNPLADPGVIGVSAGGGFVAILMTLAFPALASFVPIGAFLGAFGTAILIYLLAWDRGVSPLRVILSGVAINAFIGAMTSGVMVLYSNRVQSVISWMTGTLSGKSWYHLDMIWPYMLVGFVLSGFAIRSSNVLLLGDDAAKLLGFSVERHRFFIIMLAAFLSGVAVSVAGLIGFVGLVVPHIFRLIIGNDYKYLLPLSALGGALLVGFADTAARSWFGSIELPVGILLAMIGAPFFLFLLQRGRVAS

SEQ ID NO: 1398 - protein, 263 aa, Listeria monocytogenes
MKSALELKNVSFSRKRDFEMKNVSASIPEGKITTLIGPNGSGKSTMLRLMMRLLTPDSGEILLNEKNITEIPSKDLAKKMTMLSQAPEGLVDVMVHDLVAYGRLPHRSWLSTLQEEDEAVIHWAIKVCNLEELAYRPLHSLSGGERQRAWLAMALAQKTPILLLDEPTTYLDIAHQLELLDLLVHLNKEYNLTIVLVLHDLNQAAIYSDHVFVCENGQLVKDGSPREVFTTELLRDVFHITADITEKDGKQHIHPLASTRFEY

SEQ ID NO: 1399 - protein, 389 aa, Listeria monocytogenes
MARNRKKAVRIDYSIIFLMMLLCIIGLVAIYVAGLVNDQYTNNFLLQQSIWIVISTGVVVVIVLFFDYDKLQWAAYYLYGIGNLLLVLVLIVGDERKGSKSWISIGSLGSLQPSELMKSFLILALAKVIWDHNKKYKLHTVSLDMQLLLKIGIVSILPLGLVALQPDLGTILVFIAIIIGMVFISGVTWKILLPVFSSIALIGGTLIYLVMYNQEFLQKLGFKPYQFKRITSWLRPEEDPLGDGMQLLRSMQAIGSGQLQGNGIGNQAIAIPENHNDFIFSIIGGNFGFIGGCVLIMLYFLLIYQIIRVALDINIPFYSYICTGVCSMILFHVLENIGMTIGLLPITGIPLLFVSYGGSSLLGAFMALGLVLSARYNAPEVNLGKENRF

SEQ ID NO: 1400 - protein, 391 aa, Listeria monocytogenes
MNQQNKLAGRIDYGIVLSMMLLMIISLVSIYSAQLTNNQYDANFVVKQAMWFVVSTFAIIVVMQLDYDRLTKWAYYFYGLGLFLLVFVLLFGKEVKGAKSWIVIPFLGNIQPSEVVKVILIVVLAKVIWDHNRTYKIHRFSYDAWLLLKIGLFTLMPLILIMLQPDLGTALVFIAIMSGMILISGITWKIIVPLFGSIAAIGTALIWMVIYHQNWLTSLGFKPYQFERITTWINPENDPQGGGYQVLRAMTAIGSGQISGNGAGYDAIAIPENHNDFIFTIVAGDYGFIGASILLAIYFLLIYQIIRVALDVGVPFYSYICTGVVMMLMFHVLENVGMNIGLLPITGIPLPFISYGGSALLGNMMAVGLVLGIRFNFKKSMFEVKEENHAS

SEQ ID NO: 1401 - protein, 117 aa, Listeria monocytogenes
MINFYWYPKCSTCKKAKAWLENEHVDFNEVDIKTETPTAEELQQWHEASGLPVRRFFNTSGIKYRELGLKDKLDTLSPEEAYKLLASDGMLIKRPLTTNGKEVTLGFKEEEFEATWK

SEQ ID NO: 1402 - protein, 454 aa, Listeria monocytogenes
MRKMKKMDADTLTAILAFQRLSGTGKSLLEGAAKDAEAGRYSIIAINPVHEIKVYQHDYYIDGTHQVVADPLKEIELFIEKAREDELELPLDSGAIGYVGYDVIALYEDLGEIPVETRDIPDIRFYVYESFVIMDHQAEELILVQDNCYSGRSEADLDKALESMLTELTTPKKDEHKAVHVPKMSYKSNYTKDEYMGLVKKAKTYIQEGDFFQIVLSQRLEADFTVKPFDYYRKLRLLNPSPYLYFIDFGDTVLIGSSPESLIKTKGRTVITNPIAGTRRRGATKQEDELLASELLSDEKELAEHRMLVDLGRNDIGKIAETGSVHVPVYLTIERYRFLMHLVSVVEGTLKTGLTAIDALRSTLPAGTVSGAPKIRAMERIYEWENVKRGPYAGAVGYLTKNGDSDFALSIRTMVLHNGKAYVQAGAGIVYDSDPESEYLETLQKAKALLEVGE

SEQ ID NO: 1403 - protein, 201 aa, Listeria monocytogenes
MILLIDNYDSFTFNLEQYLAEFSEVVVKRNDAADLIKIAALADGIVLSPGPGKPSDAGLLEEVVAKFAKEKPLLGICLGHQAIGEVFGGEVKRAAKIRHGKVSTMRQTAGAIFANLPEEMPVMRYHSLIVDKNTLPDVLEVLAIATDDSEVMAMKVKDYPVYGLQFHPESIGTNDGKQMMENFIHIVEGARENGNLTTKSI

SEQ ID NO: 1404 - protein, 339 aa, Listeria monocytogenes
MEILLQKVYDQENLSKEEMNIIATEIFEGRLSKTKMAAFLMALKVKGETAEEMAGIAQAMQQVAIQVAFPAGTAMDNCGTGGDKSNSFNISTTSAFVLAAAGIPVAKHGNRSISSRSGSADVCQELGIDINLRPEDMTYLLEKVGIAFLFAPHVHPNMKYVMDVRKELGTPTIFNLIGPLTNPVHLETQLMGIYRRDLLEQTAEVLGQLGRKRAVVLNGAGFMDEASLAGENHYALYENGEVHLYTLRPEDVGLTSYPLEAITGGDAKENAAILRSVLEGEPGAYLDTVLLNAGFGLFANGKVETVQEGVDLAKDLISSGLAKQKLADLITYQKEVLAK

SEQ ID NO: 1405 - protein, 252 aa, Listeria monocytogenes
MTFLEEILAQKEVEVAKMPLEQVAEKRKTYSFYEFLKANTNTMQLIAEVKRASPSKGEINMGVNPVLQAKSYQAAGAGMISVLTDPVFFKGSIEDLREVAKNVGIPVLCKDFIISEKQLIRARNAGATVVLLIISALTEEKLITLFEQALALDLEVLVEVHDQEELAVAQKIGAQLIGVNNRNLHTFEVDIAVSERLASDFSSDACFISESGFRTAEDVARVSQKYDAVLVGEALMREATPEVAAKSLKVTR

SEQ ID NO: 1406 - protein, 159 aa, Listeria monocytogenes
MTQLTFRNGTEQDTKLILRFITELATHEGIEKDVVATESGLHKALFQEKSAEVIIAEYEDAPVGFALFFHNFSTLLGKKGLYLEDLYIIPEMRGKGFGTQFFSYLSKLALARDCGRFEWWCLNENKSGMDFYEKIGAEKMSEWTVHRLTKAEMEKLSNL

SEQ ID NO: 1407 - protein, 229 aa, Listeria monocytogenes
MNKLNEALKKAERIVFLTGAGVSVPSGIPDYRSKNGLYAGMSSPEYMLSHTCLVREPEKFYQFVTENMYYPNAVPNVIHKKMAEIETEKDVTIITQNIDGLHEKAGSKKVVNFHGSLYHCYCQNCGMTVTAKDYLKSDIHTDCGGVIRPDVVLYEEAISESAIDQSLTAIRKADLIVIVGTSFRVSPFCNLTDYRNKKARIFAVNKERISLPYPFEMMESDAVKVFEEI

SEQ ID NO: 1408 - protein, 202 aa, Listeria monocytogenes
MIVKICGLKKAVDVAAAVENGADMIGFVFAKSKRQVTVDEAHELAKNIPAGVKKVGVFVNPTEEELTAAIKGVPLDIVQLHGQEPAEQANRTDAEVIKAFPVKDGKLPDNINDYPNAYILLDAPAEEYEGGSGKTFDWDKIDRDLLTKNKLIIAGGLNAQNVQEAIKRFEPYAVDISSGVETNGEKDPQKIKCFIKTAKGVE

SEQ ID NO: 1409 - protein, 400 aa, Listeria monocytogenes
MTYQAPDENGFYGKFGGRFVPETLMKAVKELDEAYQASKTDPAFQKELNYYLKEYVGRETPLYFAEQLTAHAGGAKIYLKREDLNHTGAHKINNTIGQALLARQMGKQKVVAETGAGQHGVATATVAALFNMKCTIFMGEEDVKRQSLNVFRMELLGAKVVSVKAGSRTLKDAVNEALRFWVANVEDTHYIMGSVLGPHPFPEIVRDYQSVIGIEARKQHLEKEGKLPDAIVACVGGGSNAMGLFYPFVDDASVQMHGVEAAGHGLETEFHAATISKGEIGILHGAMMDVLQDENGQILEAFSISAGLDYPGIGPEHSFFRDLGRAAYHSVTDDEAVEAFQLLCRTEGIIPALESSHAISYAVKLASKMRPEESMVVCLSGRGDKDVNQLKERLEGQTND

SEQ ID NO: 1410 - protein, 257 aa, Listeria monocytogenes
MTKTLTNKLAEKEHAAVVTYIMGGDGGLDNLEEQLLFLEKSGVSAIEIGIPFSDPVADGPIIQLAGLRALKEQVSLEAILNKLAMSKVQIPLIIMSYINPIFHLGIPKFVELVQKTPVKGLIIPDLPYEHQKLITPELQGTDIALIPLVSLTSPKERLEEIAKQAEGFIYAVTVNGTTGVRSEFDAHIDSHLAYLKSISPVPVLAGFGVSSIEHVEKFAHVCDGVIIGSKVVQMLHEEKTAELGAFLQKAAEVRIKN

SEQ ID NO: 1411 - protein, 145 aa, Listeria monocytogenes
MSVEVKPEHARMLNNTKNVTLGIAIVSTIQAVLSAVSIVGLFALQQRKEVLANAHATAVVQNTIMTTTIMAVICIAFTIMLFLSFNKLRKGIIITPLVYYLYAAFTILGVILSMINSGVNFVSLVLPAVLLALSVTCILNLRRMR

SEQ ID NO: 1412 - protein, 537 aa, Listeria monocytogenes
MSSKLMRGTAVLTAGTLLSKILGILYVIPFYWIAGGEQATILYQYGYVPYQIFLNIATAGVPLAVAKYISKYNSLNEYALSQRLYRSSTYLMIFTGIASFLIMYIFAPILAGMQEVSGGTSIEDITTVIRAVSFALLIIPVMSLLRGYFQGFHSMGPSAVSQVIEQIARIVFLLASTYIVLHLIGGSLVTAMSLATFAAFVGAFFSLICLIWYYRKRKPGIQKMIDGSDNKLRVSTFHLLKEISISAVPFIIVGMAMSLYQQIDLFTFARILTYDGMDGKTAEDLLSIFNFSVQKIIMIPGTLALAFSMTLVPLVAASFHKGRIREVHHHLTAVFQVLLFLVVPACLGIALLAVPLYTIFYGYNTDGSMLLQFFAPFAIFFSLFSVTAAILQGIDEQRYTVLSLLLGLLTKSVLQMPLILLFGAKGGALATGLGYIVSVVFTIFIIKKYAKYSFKYLFRRLILILGISAVMLLSVWLIYHGLILFLNPHARLSALVIVFVSAGFGAYIYAFLAAKAGLLNYILGDRMYKIRKKLHLI

SEQ ID NO: 1413 - protein, 537 aa, Listeria monocytogenes
MGSKLLRGTFILTLGTLISKVLGILYVIPFYAIIGGDEPALLYNFGYVPYQLFLSIATAGIPLAVAKYIAKYNAMEEYAVGRRLFKTGVYLMIFSGIVCFLAMYGLAPTLARMQQLEGGYSLADGIQVIRAVSFALLIIPVMSLLRGFFQGYNSMGPSAVSQVLEQVVRIMFLLAGTFIVMYVLDGNVVTAISIATFSAFVGAFASLLLLLWYFYKRKPGLDRMLLEDRGTVKISIPTLYKDIILSAIPFIIVGSATSLYQLIDQFTLGRVLEYIGITPELVNSYVAIINFDVQKLIMIPGTLAIAFSMALVPLVTGAYVRKEYAQVKRQLNDVFQILLFLTIPACFGIAMLARPLFTVFFSPSDNGTELLQLFAPIAILFSLFSVSAAVLQGIDEQRFTVLGLLLGLLAKSVLQMPLIMLFEAKGSIIATGIGYAVSCIFMLLIIKKYVRFSFKVILRRTVLFFVMTAIMGLVVIALYIMMSNFVTTDRKIPALIITIVCGGVGAIFYGYMAFKLHLSDKLFGPRGTRLREKLRIR

SEQ ID NO: 1414 - protein, 217 aa, Listeria monocytogenes
MKKTPFIISGIGLLGFIFFMTGVMTGAKWIQRFDHYWNSVIRVGITDTKTTVISYLTDIGGVATICILTAIIIIVFVFMRKVDTAIWFGSIVLIGGALIPSIIKNIVQRPRPTYKLIEQGGFSFPSGHSTGSTVFYGMLAFLLILYVSRSWLRFTIGILALGIVIFVMYSRVYLGVHFPSDVVAGFLIGNAALFSGIGCYFIWNEKLALWANKFKKA

SEQ ID NO: 1415 - protein, 276 aa, Listeria monocytogenes
LKKITPKAMCAWIPKREDETHKGDYGRVLIVAGNKQFGGAAIMAAEACVKSGAGLTTVASDSVNRPALQTRIPECMFIDYENITSLSEQISQFDTILIGPGLGLDAYAEEIFRLVLQKSTEHQQVIIDGDGITIYAKGENPHPAAKLTFTPHAGEWERLKVLAPDAVTPTDVALAIDATIVLKGHRTKVYSGESAWQNMYGTPAMATGGMGDTLAGTICGLMAQTEKPITGTLAAVFLHSYIGEILAKKRYVVLPTEIAEELPTYLKIFSETDEHA

SEQ ID NO: 1416 - protein, 97 aa, Listeria monocytogenes
MARKYEIMYIIRPNIEEDEKKAVVERFDGILTENGAEIIESKEWGKRRLAYEINDYRDGFYHIVKLNADKADSINEFDRLAKISDDIIRHMVIKEEA

SEQ ID NO: 1417 - protein, 178 aa, Listeria monocytogenes
MMNRVVLVGRLTKDPELRYTPAGVAVATFTLAVNRTFTNQQGEREADFINCVVWRKPAENVANFLKKGSMAGVDGRVQTRNYEGNDGKRVYVTEIVAESVQFLEPRNSNGGGGNNYQSGNNNNNYNSGGNNFGQAPTNNGGFGQDQQQSQNQNYQSTNNDPFASDGKPIDISDDDLPF

SEQ ID NO: 1418 - protein, 203 aa, Listeria monocytogenes
MYKKLATVGMTVLLVGALSACSFNDDKDTSSNNSNNETTSSKSSNNESSSDSLQNKSLDMSYEDAINAFKDKHSDAEISSVELEKSLGKYVYKVDGISNDNEYEMKFNAETKEQLSDETDRLDREDAGGVEKENEKLSLDGIKSPKEAMDKAVSEQAGDVTSWKIERELDTTYYEVTVKQDNNKYEIKLNAKTLEILQTEQDD

SEQ ID NO: 1419 - protein, 204 aa, Listeria monocytogenes
LSNFTAKVPLSERMADVLISKDRWKDDEEGYLKVKYGLEIILINVMKFALVYGIALVTGLLLQTVTVHLSYLWLRRYSFGLHATKTLNCTLISLLMFVLAPFVFQNIPSNNWIVLGTFGFILLNMFLFAPADTESLPLIGEEHRKTLKRKAMIGTLILTGIALLIPFAEMKTLIMVGSLFQVISINPLTYKLLKRRYRNYEKYE

SEQ ID NO: 1420 - protein, 431 aa, Listeria monocytogenes
MFSILMAIIQITGIFIAIQILTNKVFSIKEGLVTIAIAMLAFPLFTLVQYWSMIFVLIVFVSALYWKNKNVVVSASITLVVIILLTISDSIVGFILVPGLNFKYDEIFNELLPTLIYCAGMLANLLVFSFLLRKLIEKVNISRFVEHRKYAYIIFSIVALTVLAFYMNIYAGSIAGFDGSVLKINTLIFTGYTILLIVIVTVVINTATNELKVQNQKEQLEQLQDYVTTLESLHREMRVFRHDYVNILSTLVGYIDNNDMPGLKYYFENNIVPINKTIESNNYKISLLQNIHVIELKGLLAVKLIRAQELKIDAILEVVEPIDKISMDSIDLCKVVGILLDNAVEAALTCENPVIRIAFVKKGDSIIIVFANSLPVNMPPIYKIFEEGFSTKGEGRGLGLASLREIMKKYSHVALDTKVTDREVIQELEIM

SEQ ID NO: 1421 - protein, 242 aa, Listeria monocytogenes
MLPVFICEDNRMQRERLTKYIEDYIMVEHFDMKLELSTGDPFELVSRMPTHQGMGLYFLDIDLGQPDMNGFELAQEIRKFDPRGFIIFITTHAELSYMTFTYKVEALDYIIKDDIDLLHDRVLACMKQAEERISNDQDMQKYFTFKVSDKKIIHELLDDILFFETAPTIHKVILHGKNRQVEFYGKLKNIEKMLDESFYRCHRSYIVNKKNIHELDTTKGVVKMSNGENCYASSKLIKSLSL

SEQ ID NO: 1422 - protein, 96 aa, Listeria monocytogenes
MPTNLIQLPGIGKKMVLMLNEIGIEEVADLRGRNPLELYEDTCDKRGERMDPCVLYTYRCAVYVAETDEAEQDVDLRKWWNWKDKQHTNERNLKNE

SEQ ID NO: 1423 - protein, 657 aa, Listeria monocytogenes
MSGYFQKRMLKYPLYGLIAATIILSVITFFFSWWLSALVVVGGIILTVAMFYFEYRLNEDVQLYVSNLTYRIKRSEEEALVEMPMGILLYDEHYKIEWVNPFMSKYFDKAELIGESLEEVGPEFLDVITGNDEKGIMSIAWRDHRFDTIVKRKERILYLYDRTEYYDLNKKFQANKSVFAVIFLDNYDEWAQGMDDRRRSALNNLVTSMLTNWAREHRIYLKRISTDRFMAFLTEEMLKRLEEEKFQILDRIRERTSKQNIPLTLSIGIGYKEDDLIQLADLAQSSLDLALGRGGDQVVIKQPEGKVRFYGGKTNPMEKRTRVRARVISQALQELITQSDQVFVMGHRYPDMDVIGSSLGVMRIAEMNDRNAYVVVEPGKMSPDVKRLMNEIEEYPNVIKNIVTPQVALENITEKSLLVVVDTHKPSMVINKELLDSATNVVVVDHHRRSEEFVGSPVLVYIEPYASSTAELITELFEYQPDLEQVGKIEATALLSGIVVDTKNFTLRTGSRTFDAASYLRSLGADTILVQQFLKEDITTFTQRSRLVESLEIYHDGMAIATGHEDEEFGTVIAAQAADTMLSMEGVQASFVITLRPDKLIGISARSLGQINVQVIMEKLGGGGHLSNAATQLKDVTIAEAEKQLISAIDAYWKGET

SEQ ID NO: 1424 - protein, 148 aa, Listeria monocytogenes
MKVIFLKDVKGKGKKGETKNVADGYANNFLIKNGYAVEANNAALSTLSAQKKKEDKLAAEELAEAKALKEKMENLTVELKAKSGEGGRLFGSITSKQIAQTLEKTHGIKIDKRKMDLPEAIRALGHTKVPVKLHHEVTATLDVHVSEE

SEQ ID NO: 1425 - protein, 450 aa, Listeria monocytogenes
VDNNFQDRTPPQNIEAEQAVLGAIFLEPNALITASEILMPDDFYRTGHQIIFETMLDLNDHGKAVDVLTVYEALAAKGNLEDAGGLPYLTELSGAVPTAANLEYYAHIIEDKALLRRLIRTATQIATDGYSREDELDMLMDEAEKSILEVSQRKNVGAFKNIKDVLVKTYDDIEILHNRKGDITGIPTGFNELDKMTAGFQRNDLIIVAARPSVGKTAFALNIAQNVATKTDENVAIFSLEMGAEQLVMRMLCAEGNINAQNLRTGALTSDDWQKLTIAMGTLSNSGIYIDDTPGVRVNEIRSKCRRLKQETGLGMIVIDYLQLIAGSGRGGENRQQEVSEISRSLKALARELEVPVIALSQLSRSVEQRQDKRPMMSDIRESGSIEQDADIVAFLYREDYYDREGENDGTIEIIIAKQRNGPVGDVKLAFVKEYNKFVNLEVRYDDAMA

SEQ ID NO: 1426 - protein, 436 aa, Listeria monocytogenes
MLKKYGVATALSLLIISAPLTGAHADTINDMQKRQNEIEQKKSEIDKNIDSKNSELNHLESAEKDAAKELESLMKSLDDTNKKLKEQEDKVSSENEKLKKLQKEMEKLRNDIRDRQKVLDNRARAIQTTGTATSYLDMIFEADDFKELVDRVTVVSAIVKADQNIMQDQKDDQDKLKVAESTSEKKLENLKVLAVELEVSKNNMESQKQEKNDLVMALANKKDLTKSEQTLLASEQGALTDEEKRLASNIAGEKAKQEAAIKAAEEKRMQEAAAASSAKSAAVVKQPSSSSNEATETVSSGGGQFIKPASGILTSGFSERTNPVTGKYESHKGQDIAGGGTVTVSAAASGTVVFSGFGASGSGFGGYGYVVKIDHGNGFQTLYGHMRAGSLKVVTGQQVSQGQPIGIMGSTGQSTGQHLHFEIHKNGIPVDPAPYI

SEQ ID NO: 1427 - protein, 401 aa, Listeria monocytogenes
LKKNTFIAISLAAVISLTPAFTTNVFADVNTDIQNQDKKINDIKSKKTDLQSDLSGLVADLEKAQEKAKSLQGEFDKTGKELKKLNEDIKSINERIKERETVLKERARAMQKTSNSNAYLEVILDAENLSDLVGRVSAVNQLVDSDKSILEDQQNDEKALKTKQTAVKKKQEDQATAIHEYEAQQNKIEAQKAEKEAIVAQLASDQASAENAKAGLVSERDKAAKEATARATALREATSSNVGQESSSSDTSTPSKKSNTTKNVASNDNNSAPSAATPSSGGYSAMISAANAQLGKPYSLGATGPSAFDCSGFTSYAFRAAGVSLPRTSGGQYAAASKISASQAKPGDLVFFNYGSGIAHVGIYVGGGQMINAQNNGVKYDNITSGYWAKYLVGYGRVANF

SEQ ID NO: 1428 - protein, 294 aa, Listeria monocytogenes
MKFRTVGRHIRESFKSLYRNGWMTFAAASAVTVTLILVSVFFAILINMNKLATDVENNVQINVHISLSADKKQQQELEKNIEKIDGVDSVSFSSKDDELKKLVGAYGKNFELFKQDNPLYDVFVVEAKEPTQTKTIAKKVEKLQYVDNVEYGEKTVDKLFDTLKWGRYAGIILSIGLLLTAMFLISNTIKIAIFSRRREIEIMKLVGATNWFIRWPFVLEGAWLGLIGSILPVVLTFIGYVNIYNLVNPKLVTSSLSLLPPTPFAYQISGLIIAIGVLIGIWGSVISIRRFLKV

SEQ ID NO: 1429 - protein, 402 aa, Listeria monocytogenes
MENWKKNLYVVWVGCFLTGTGLNLIMPFLPLYIEELGVHNPDQVSMWSGIALSSTFLVSAIMSPIWGKLADQKGRRIMLLRAALGMAIAMILMGLVSNVYQFVGLRLLMGIFSGYISTANALIATQVPRHRSGWALGALSTAAVSGVLIGPLIGGALSDTFGVRPVFYITGVLLLGSFFLTLFFVKEKFTPVEKKEMRSGKEVFLSLKNPGLIISLFITTMMIQIASNSVNPILTLYVRDLAGNAQNIAFISGMIASVPGVAALIAAPRLGRWGDRIGSERILLGALIGSMLLQIPMAFAQNPLQLGILRFLLGLTDGALLPAVQSLLTKNTPREVAGRIFGYNQSFQYIGNVIGPLVGSSVAAHFGYGDVFLVVAGFIFINVLISFYFNRKMHGEKGNHAN

SEQ ID NO: 1430 - protein, 228 aa, Listeria monocytogenes
MILMEDVYKKYPNGITAANGLNINIGEGEFVYVVGPSGAGKSTFIKMIYREERATKGKIIVDKFDLINMKNREIPYLRRNVGVVFQDYKLLQSKTVYENIAYAMEVVETEPSVIKERVMEVLDLVNLKHKVRMLPDELSGGEQQRISIARSIANMPKVLIADEPTGNLDPDTSWEIMNILEEISNRGTTIVMATHNKEIVNTLKHRVIAIENGRIVRDEQQGEYGYEI

SEQ ID NO: 1431 - protein, 287 aa, Listeria monocytogenes
MTNKRKKQPLSPVASKLIEYIYVIIGAALIALAFNVLLLPNHVASGGVSGISTIINYLTGWNPAFIQWAFNIPLFLAGLFFLGYQFGLKTFVGTMLLPFFVYLTQGLEPWTHEPLVAALFGGVLVGMGLGIVFRGKASTGGTDVAAQILHKYSHLTLGICVALIDGFVVISAMFVFDIESGLYALVGLFATSKTIDLVQVGLNQSKTVFIISENQEAIRQAILFKIDRGITRLSAKGGYTEDDKQILLCVIAQSEFSRLKEVIKEIDPEAFVVVMSASEVMGEGFTS

SEQ ID NO: 1432 - protein, 327 aa, Listeria monocytogenes
MLDPNFWNDQQAAQKVINESNGYKETYQAFHALEEEQESMEISLELLKEEADEDLQEELEKDIKAYMATISAFELKLMLSDPYDKNNAILELHPGAGGTESQDWGSMLLRMYQRWSEKKGFKVEMLDYQAGDEAGIKSVTLLIKGHNAYGYLKAEKGVHRLVRISPFDSSGRRHTSFVSVDVMPELDGDIEIEVRTEDLKIDTYRATGAGGQHINTTDSAVRMTHIPSGIVVTCQSERSQLKNREQAMKMLKTKLYQKEQEEKERELAEIRGEQKEIGWGSQIRSYVFHPYSMVKDHRTNYETGNIQAVMDGDLDDFINAYLRSRIG

SEQ ID NO: 1433 - protein, 837 aa, Listeria monocytogenes
MAGLLKKIFESGKKDVKYLERKADEIIALADETAALSDDALREKTVEFKERVQKGETLDDLLVEAFAVAREGAKRALGLYPFKVQLMGGIVLHEGNIAEMKTGEGKTLTATLPVYLNALSGEGVHVVTVNEYLAHRDAEEMGVLYNFLGLSVGLNLNALSSTEKREAYACDITYSTNNELGFDYLRDNMVVYKEEMVQRPLAFAVIDEVDSILVDEARTPLIISGEAEKSTILYVRANTFVRTLTEEEDYTVDIKTKSVQLTEDGMTKGENYFDVENLFDLENTVILHHIAQALKANYTMSLDVDYVVQDDEVLIVDQFTGRIMKGRRFSEGLHQALEAKEGVTIQNESKTMATITFQNYFRMYKKLAGMTGTAKTEEEEFRDIYNMRVIEIPTNKVIIRDDRPDLIYTTIEAKFNAVVEDIAERHAKGQPVLVGTVAIETSELISSKLKRKGIKHDVLNAKQHEREADIIKHAGERGAVVIATNMAGRGTDIKLGEGTIEAGGLAVIGTERHESRRIDNQLRGRSGRQGDPGVTQFYLSMEDELMRRFGSDNMKSMMERFGMAEDAIQSKMVSRAVESAQRRVEGNNFDSRKQVLQYDDVLRQQREVIYKQRYEVINAENSLREIIEQMIQRTVNFIVSSNASSHEPEEAWNLQGIIDYVDANLLPEGTITLEDLQNRTSEDIQNLILDKIKAAYDEKETLLPPEEFNEFEKVVLLRVVDTKWVDHIDAMDHLRDGIHLRAYGQIDPLREYQSEGFEMFEAMVSSIDEDVARYIMKAEIRQNLEREQVAKGEAINPAEGKPEAKRQPIRKDQHIGRNDPCPCGSGKKYKNCHGKEA

SEQ ID NO: 1434 - protein, 306 aa, Listeria monocytogenes
MKKFLLDKIGARGLIQMLQAFIYASICVVVHTVIFPDLAGVLPIVVLIGIISMQPTYGITRKVIPQIALAFTLACVFVIISTYFFPINVYIYYVVMIVVILAVNFLMPQKYMVMTLAIGTALYFLGTDDLPMPLYAMIIVALMDVFVFFLLVQLVVKYVHLPLEKTVQTIMKQLVGLFDKEIESVFKNNGKFIAKPLYSIFVQSQMFIKEYSASKKANPRHVELYQALLPNYLQLFFHMQTMEDIGRVGLSEEAKQALAQINVKVSDEINVKEADPVASFHVKKFVENFLAVKVGMNELVEGRGQK

SEQ ID NO: 1435 - protein, 219 aa, Listeria monocytogenes
MKEGFAVIGLGRFGGSICRSLVEQGMEVLAIDSDEERVNEYMSIATHAVIANSTDENALRQLGIRNFEHVIVAIGEDIQSSILTTLILKEMGVKYVTAKATNDKHAKLLDKIGADRVVHPERDMGRRIAHYIVSKNMLDYLELSDEYSLVEISVSDPRFLGKSLVDLDFRNSFGVNIVGIKKDKQMIITPEANDVLHEGDILIVIGSDDDIERLQEKIQ

SEQ ID NO: 1436 - protein, 212 aa, Listeria monocytogenes
MIKVLLVDDHEMVRIGVSAYLSVQDDMEVVGEAENGREGADMALELRPDIILMDLVMDEMDGIEATKEIMQNWKEAKIIIVTSFIDDEKVYPALEAGASSYMLKTSTASEIADAIRATYGGDSVLEPEVTGKMMQRLTAKPEKNLHDDLTNRENEILLLIAEGKSNQEIADELFITLKTVKTHVSNILSKLDVQDRTQAAIYAFKHDLVEKK

SEQ ID NO: 1437 - protein, 352 aa, Listeria monocytogenes
MSFSKLMMAVCSGLLLVATAIGTVGYYFFSEGSWYKILIEQKIFYIPFVVFVPLTAISIGLIIGGLIGYFVKQKFESIDFSIRLLGQGDLEKKITSEEDENFLEVQQVYKQIDRLRDKMKAQTILTQKLASDRAESTGQTKEAILSEERHRIARELHDSVSQQLFAAMMLLSALNEQSEKSATPAMQKQLKMVESIVNESQSEMRALLLHLRPTQLEGKSLKTGIEQLLKELTTKLPIEVEWQIEDISLQKGIEDHLFRIVQELLSNTLRHSKAKLLEVRLVTMDNLAVMKVVDDGVGFDMDNVRQGSYGLQNMRERVAEFGGTIKIISFPGRGTSVEIKIPLVAKKDVESE

SEQ ID NO: 1438 - protein, 115 aa, Listeria monocytogenes
MNQTFIVKKEHISQYPNPLFVNKNESIWVFEEDTEYPGWIFCKVKSSGKEGWIPKQIIQISNDGKSGTVSEDYSARELNVKPGDKLESNRELNGWVWCVTEENEAGWVPRENLEV

SEQ ID NO: 1439 - protein, 237 aa, Listeria monocytogenes
LKKMESSVVFVFLIAIIVGVGLEMLFQWELLILFALGIFFIFTSRKASATKKSARNSLFIGIVFIIIAVLLTTTFKVGLVVAGIYAIIHYISRKRAPQLLMLKTREPDSKIDRTDKFIRNQWFGNQRILDVVYEWDDINIQTGIGDTILDLGNTVLPTGESVIMIRSVSGKIRILVPFDIGICIEHSAIFGNIQYDKESTSIQNNSIKVYSDNYESSARKVKIMTSVIFGDLEVIRL

SEQ ID NO: 1440 - protein, 290 aa, Listeria monocytogenes
VNNYIGKSQVMTVKEIKDTGWLLEKDGVTVFLSKSNTHETELAVGAEVTVFIFVDYDREIAATTIIPKIQVGHYGWGTVTEVRKHLGVFVDIGIEKDVVVSLDDLPALPHLWPKKEDRMMIALRVDEENRVWGVLAEEEQFRAIAVRAEQDLFNQNVEGTIYRLLKVGSFVFTDDFHIGFIHESERTSEPRMGERVKARVIAVKPDGSLNLSLRGRAHEVLNDDAEMILTYLRSVGGEMPFGDKSDPDAIRAKFGISKAQFKRAIGTLLKARRITQENGVVTKITEETSD

SEQ ID NO: 1441 - protein, 231 aa, Listeria monocytogenes
MLEVIVQNPRDAYLAEKYGANRMEVVSAISEGGLTPSYGAIKEIVRASKLPAMMMIRPHSFSFVYDEAAKIVMERDIELAKEVGVQGIVYGGITENGAIDQALLEKVIEWKGDLNLTFHRALEATKDIEASYQVLRTYGKDINQLLTSGGTANALDSLPRLKRWIQDSEAQPDSFQVLVGSGVKPENIATFQATLNHSDYHVGSAAREANDFSKDILKEKIDILQQQINKD

SEQ ID NO: 1442 - protein, 163 aa, Listeria monocytogenes
MFKKFLKKSKQEVLFAHVTGQVIALEDVPDPVFNQKMMGEGIAIKPETGTIVAPIDGKIIQLAETKHAFGIRTDMGQEILVHIGLETVSLNGEGFNVLVSVGDKVKVGDPIVEADFDFIEKNAASTVVPMVITNSSEGKYDFDFHAVPKAEAGKTEVITTNLK

SEQ ID NO: 1443 - protein, 300 aa, Listeria monocytogenes
LLKKLITTAVLAMLIFTLAACGTTLAPYDAKKDLGEQINYTITGIDAGAGIMLATQNAIKDYHLDDDNWQLQTSSTAAMTSTLQKAMKDKRPIVVTGWTPHWMFTKFDLKFLDDPKNVYGNAENIHTIVRKGLKEDKPSAYQVLDNFFWTAEDMSEVMLEVNDGVDPEEAAKKWIKNNPDKVAKWTDGVEKVDGDEIKLTYVAWDSEIASTNVVAEALKQVGYKPTIQAMEIQPMWASVATDAADGMVAAWLPNTSGIYYKDYKGKFEDLGPNLKGAKIGLAVPKYMTNINSIEDLKTSK

SEQ ID NO: 1444 - protein, 282 aa, Listeria monocytogenes
MPNIPTIPLASWIDKLVDGLTQFEGFFNVITNIIGGIVDAFQWVFDLVPPWLFIILLVFGTFWVNRKGKKWGLIIFEVVGLLLIWNLDFWRDMTQTLTLVLTSSLIALVIGVPLGIWMAKSNIVESIFKPVLDFMQTMPAFVYLIPAVAFFGIGMVPGVVASVIFAMPPTVRMTNLGIRQVSTELVEAADSFGSTPWQKLWKVQLPMAKSTMMAGINQSIMLALSMVVIASMIGAMGLGTRVYFAVGRNDAGGGFVAGIAIVIVAIILDRLTQAFNKKAKSE

SEQ ID NO: 1445 - protein, 214 aa, Listeria monocytogenes
MRFFIDTANVEEIKKANRMGFISGVTTNPSLVAKEGRDFNEVIQEITSIVDGPISGEVVSLEADEMIAEGRVIAKIHPNMVVKIPMTGEGLAAVKVLTEEGIKTNVTLVFSATQALLAARAGATYVSPFLGRLDDIGDDGLVLIRDIADIFEIHGIPTEIISASVRHPIHVIECAKAGADIATVPFKVFEQMLKHPLTDSGIDKFLADWEAAKK

SEQ ID NO: 1446 - protein, 397 aa, Listeria monocytogenes
LSKIKVEELTKIFGKKASKASSLLSQGKSKTDILKETGATIGVNKASFSVEEGEIFVIMGLSGSGKSTLVRLLNRLIEPTSGKIWLDGKELSSLNKKELLEVRRKSMSMVFQNFGLFPNRTINRNVEYGLEIQGMDKEEREKNAAESLALVGLAGYGDQYPSQLSGGMQQRVGLARALANNPDILLMDEAFSALDPLNRKDMQDQLLDLQDKMKKTIIFITHDLDEALRIGDHIMIMRDGSVVQTGSPEEILAHPANEYVEKFIEDVDRSKVYTASNVMIRPEIVNFEKDGPRVALKRMREAGTSSVFVVKRNRELVGIVHAAEVSKLVKENITSLETALHRDVPTTGLDTPLAEIMDTISTTTIPIAVTEDGKLKGIIIRGSVLAALSGNEVNVNA

SEQ ID NO: 1447 - protein, 281 aa, Listeria monocytogenes
MNLLKKWFSSIDWDQFWNHIISVGIKIAILIALYFIFRVIGNKIIRSFFRKYRQQQAVSVGRADTLESLISNFYGYVLFFTFAILLLQNFMDVTAIIASAGVASLAIAFGAQGLVSDVVTGFFILLERQLDVGDTITIGLVNGTVEALGLRTTQVRDFDGTLHFIPNRQIMVVSNHSRGNMRVMVDIQISPHEDPEKAIKIIGEVCDVAAKENKNIVEPPVVLGVQNIDATNMIIRVVGKAVNGEQYSVQRDLLKDIREALAENKIELPLNFVSTFGPNNN

SEQ ID NO: 1448 - protein, 371 aa, Listeria monocytogenes
VLNEFIAIRRELHQIPETGYKELKTQAYLLDYISKLPSGHLEVKKWRTGILVLVKGTNPEKTIGYRTDIDALPITEETELPFASKHPGNMHACGHDLHMSIALGVLTHFASKPAKDNLLFVFQPAEEGPGGAKPIMESTEFAEWRPDSIYGLHIAPEYKVGEIAIKPGLLFANTSELFISFKGKGGHAAYPHLANDMVVAASAFVGQMQTIISRNIDPMDSAVITIGRIHGGEIQNVIAETAYLDGTIRTLSPETMEIVWTRLKQLAKGWEEAYQCEVEFHPGSDYYQVDNDPVETEEFIHFLEEQYPESYVPARSAMTGEDFGYFLSEIKGFMFWLGVDSEYSLHHAKLNPKEEAIPFAIDVLIHFLESK

SEQ ID NO: 1449 - protein, 236 aa, Listeria monocytogenes
MEQMDAHQIISFIQNSKKATPVKVYLKGDLEKIDFPSDVKTFITGNAGTVFGEWAVVEPLLEANKANIEDYVIENDRRNSAIPLLDMKNINARIEPGAVIRDQVTIGDNAVIMMGASINIGSVIGDGTMIDMNVVLGGRATVGKNCHIGAGSVLAGVVEPPSAQPVIVEDNVVVGANVVVLEGVRIGEGAVVAAGAIVTKDVAPGTVVAGIPARELKKLDAKTASKTEIMQELRQL

SEQ ID NO: 1450 - protein, 292 aa, Listeria monocytogenes
MIVTEYELLVCLAEELNMRKSAEKLFLSQPALSQRLQTIESRWNTKIFIRTQKGLLLTPEGEAIVRHASSVIEREHTIQEKLEAMEGVVRGTLRIACASVVAQMWLPRVLKAFSRAYPNVQISLVTGWSSEVTQQLAAGNVHIGIVRGSSTWKSVQKPLFNDKLILVDTEITKIEEVFQTNRPFIQFRSDSNYYQVIQDYWQRNFGKMPRQAMLMDQMETSRQMALNGIGFAILPEVTMLGYTDKINKIPLTEKDGSILSRETNLLTYEQSLSLPQVKAFLEITDKFLEQVK

SEQ ID NO: 1451 - protein, 150 aa, Listeria monocytogenes
MISNRFGQFIDNELADSMISAEKVAHVQLGNNLEHALLVLTKCGYSVIPVLDFEFKLHGLISAAMITDAILGLERIEFERLEDLKVEDVMQTDFPVIKDFNNNERIVHLLVDHPFVCVVDSDHHFEGIVTRRVVLKQVNRYIHLQVEENR

SEQ ID NO: 1452 - protein, 77 aa, Listeria monocytogenes
MSQLLGIIQRLHAMQEDESAETQARRFEKNGTPVCEVKFFQASNSFEVEIYGDNSKYQFDDIDMTAIEIFETLQENE

SEQ ID NO: 1453 - protein, 229 aa, Listeria monocytogenes
MLFLKELESNLTVSKLMELCFEHPNYKDYCSVISTKKGEVLESLSPAGTKVYFVLSGIYGMIVEEDAEMEEESCKECIVRFLQKGDSFGLYHLFYDEWSPHVSMQSLGHGEVMEVDSNFLFSIFDKKDENNFFMIKVMAEELREAHTFAKLSFLKKEERIRKAILKCAQTLGTFSDNGILLPREITQEVLARYTNTSREYVAHTVMHLIKEDIIRNRPKPLLVMDKTRL

SEQ ID NO: 1454 - protein, 103 aa, Listeria monocytogenes
MLNDLYEEIKLRKTQPREGSYTNYLFDKGLDKILKKVGEEATEVVIAAKNDNQELIAEVSDLAYHLLVLLAEKNIPLVAIQTELQKREGKLSTTRDRKEINDL

SEQ ID NO: 1455 - protein, 105 aa, Listeria monocytogenes
MISVDFSKGLVPTIILDDQNGDVLMLAYMNEESYQKTLETGYTWFFSRSRNELWNKGATSGHTQKVKQIWTDCDNDTLLIRVTQIGPACHTGKKSCFFNLIKEDF

SEQ ID NO: 1456 - protein, 251 aa, Listeria monocytogenes
LLTKRIIPCLDVTAGRVVKGVNFVSLTDVGDPVEIAKAYNEAGADELVFLDITATVELRQTMIDVVERTAEQVFIPLTVGGGISSVSDMKELLQAGADKISLNSAAIKRPELIQEGAAKFGNQCIVVAIDAKWNGTNWSVFTRGGRNDTGLDAIEWAKKAVQLGAGEILLTSMDGDGTKNGYDIPLTKAISEAVSVPVIASGGCGNAAHMVEVFEKTKATAALAASIFHYGELSIKNVKTTLLEKGVNIRP

SEQ ID NO: 1457 - protein, 240 aa, Listeria monocytogenes
MQIFPAIDLKNGQCVRLFQGDFSKKTVVNEDPIAQAKAFATDGATYLHIVDLDGALEGRPINLEVIQKMKITAKIPVQVGGGIRSMAQVDYYLESGIDRVIIGSAALTDPDFLRAAVQKYGAKIAAGIDAKNGFVATRGWLDVSQVSYLDLAKRMEKVGVETIIYTDISRDGTLTGPNLEQMANLKEHVKVNLIASGGVSSRADLEALAQLGLYGAIAGKALYNHHISMSDIVEVEQIAY

SEQ ID NO: 1458 - protein, 208 aa, Listeria monocytogenes
MIVIIDYDTGNTKSISKALDFIGLQNKISSDATEISQADGVILPGVGAYPEAMKELTRRGLNKTLKEIAAGGKPILGVCLGMQLLLESSNEHSFTNGLGLIPGHVEKLPEDPEFAVPHMGWNQLQIKRATPLTKQLDGEYVYYVHSYYANCPEEYIIATSGYSIEVPGMINKGNIYGAQFHPEKSGQIGLEILKGFKEVTYSCKSSQQ

SEQ ID NO: 1459 - protein, 194 aa, Listeria monocytogenes
MRTATKTRVTAETSIELSINLDSQVESTISTGVGFLDHMLTLFAKHSRVTLNVKADGDTYVDAHHTVEDIGITLGLCLKEALADKASINRYGSAYVPMDESLGFCALDLSGRSYLVFDAELTNPKLGDFDTELVEEFFQAVAFNTEMNLHLRVLYGKNTHHKIEALFKAFGRALREAITINPEIKGVNSTKGVL

SEQ ID NO: 1460 - protein, 427 aa, Listeria monocytogenes
MKILTGTINELLNEVKAENNTNNSLQVESEVKSIIEKVKKDGDQALFDFTSQFDGVRLTELRVQTADIQSASSKVDPAFLVALQQAKANIESFHSKQKQHAFLDSEKDGVIRGQLIRPLETVGIYVPGGTAAYPSSVLMNVLPAKIAGVKRIVMITPPAENGINPHVLAAAQLAGVDEIYQVGGAHGIAALAHGTESIPKVDKIVGPGNIYVATAKREVFGLVDIDMIAGPSEIVVLADENANPAFIASDLLSQAEHDILARAILITTSKKIAEETQNEINKQLENLPRKAIAQKSIETQGKIIIAANTQEMFDIMNEIAPEHLEVQLENPMNYLNQIKNAGSIFLGSYASEPLGDYFAGPNHVLPTSGTAKFFSPLGVEDFTKRSAFISYTKEALAKEKDAIVLLAKKEGLDAHAKAIQIRFEEEN

SEQ ID NO: 1461 - protein, 575 aa, Listeria monocytogenes
MDQKKYSWRKFFQLLISAKPANWIIFCALFASVITTVAGLVVPLFTKNLIDGFSIASLDVKMIALIVLAFILQAITNGFSIFLLNYMGQKVVATIRERLWKKIVHLPVSYFDNTKTGEMVSRMVNDTVVVKELIADHLPQFVTGIISVVGAIIILFFMDWKMTLIILVAVPITALVVAPLGQKMFKISKGLQNETANFTGSISQTLSEARLVKASNAETLETEAGHQGINRLFGFGIREAKVVAVLGPLIFFVVMGVIVGIIGYGGIRVSAGTMTTGTLIAFLLYLFQIIVPVTSFATFFAQLQKAKGATERIADILNETEEDFDAGKKVDVSGKTIRASDISFSYNEGEPILKHVSFDTKPGEVIAFAGPSGGGKSTLFAILERFYQPKTGEILVGDIPLSEISINSWRTQIGYVSQESAMLSGTIRDNLCYGLDREITEDELWNVAKLAYADGFISELPDKMATEVGERGVKLSGGQRQRIAIARAFLRNPNILMLDEATASLDSQSEQIVQQALANLMEGRTTFVIAHRLSTIVNADQILFIEHGEITGRGTHSELVASHPLYASFAEQQLK

SEQ ID NO: 1462 - protein, 213 aa, Listeria monocytogenes
MKALKIALTKGRLEKDAVALLEKAGIDCSSMTDKKRKLIFHSSTQPISFILVKAVDVMTYVKHGVADIGIVGKDVLMEASKSHYEMLDLEIGKCQFCLASTPDFDPSSYRRKIIATKYPTVASKFFREKGEDVEIIKIEGSVEIAPVLDLADAIIDIVETGSTLKENGLIIYEKMYPISARLIVNKASLKQNKTQIFHLIDQLEQAIKEELAE

SEQ ID NO: 1463 - protein, 393 aa, Listeria monocytogenes
MNLNKNLPTGTRDKLFREARAAYKIEQQVNHYFEKRGFKRIETPVIEFEDVFSSEHQADAKLYRFFDEKGRLTVLRPDMTLPIGRVVSTTGVMLPLKLSYSGKIFRANEDFGGEQNEQTQAGIEIIGYPSIKAEIECILIGIGVLNALEIPNFQIELGHAAIYRRVTNLLNLSETAEIDFRLLIQNKSLTGIKRFVADNPSTLDDFILALPRLFGPATAILKQAKNLTTDKGILTALREMETIVEAVSYTADISVDLGLVQDFHYYTGIIFRGYADLAADNFLSGGRYDHLLEQFTSASSPAVGLALNLDSLTTLQNRAGVIKKQVSTSLLIHYDLDAIQQAEKLMQETPNSELSFFETPTNAISFAKKWHIPAVIHVSRQGIQTIFQREADL

SEQ ID NO: 1464 - protein, 151 aa, Listeria monocytogenes
MIVILYIAALIAAIALLVIAIYLGKTLKSTSQTMDEVAKSLEKITVEVQGITGQSQKLLDKTNTLLEDVNGKVAKVDPVFDAVGDIGTSLLGLSQSVRELATLATNKVEQNEAKISQAVSISNSILSFREKMKANKAAKEAAKEAAEQSNF

SEQ ID NO: 1465 - protein, 370 aa, Listeria monocytogenes
MRDARIEKLAHNLINYSVKLGAGEKVLIENFGVQKELVMALVEEAYKAGGFPFVSLKEPQIDRAMMLGADSSQYAKIAEFEGNVMKEMDAYIGLRAGDNINETSDVPADKLKIHGETVGKMHSDIRVKQTKWVVLRYPSSSMAQLAKMSTAGFEDFYFDVCNLDYGKMSDAMDGLVELMNKTDKVHLVGPGTDLTFSIKDIPAIKCAGEMNIPDGEVFTAPVRDSINGTLTYNTPSPYQGFTFENVSFTFKDGKIIEATANDTARINKVLDTDEGARFVGEFAIGVNPFIHEPMQDILFDEKIEGSFHFTPGQCYDEAFNGNQSAIHWDLVNIQRADYGGGEIYFDDVLIRKDGIFVLPELEALNPENLV

SEQ ID NO: 1466 - protein, 181 aa, Listeria monocytogenes
VAERLVGTQAPRFEMEAVMPNQTFGKVSLEKNIEDDKWTILFFYPMDFTFVCPTEIVAISARSDEFDALNARIIGASTDTIHSHLAWTNTPIKEGGIGKLNYPLAADTNHQVASDYGVLIEEEGVALRGLFIINPKGEIQYEVVHHNNIGREVDEVLRVLQALQTGGLCPINWQPGEKTIV

SEQ ID NO: 1467 - protein, 447 aa, Listeria monocytogenes
MTIYHFVGIKGSGMSALAQILHDKGFQVQGSDVDKYFFTQKALEEKQIPIMTFSADNIQEGLTIIAGNAFPDTHEEIERALELGLSVIRYHKFLGQLIDGYTSIAITGSHGKTSTTGLLSHVVGAIRPTSYLIGDGTGSGTKDAEYFALEACEYQRHFLAYKPTYAIMTNIDWDHPDYFKSVDDVFNAFETLGKQVKKAVFALGDDAELRKLTLDIPIIYFGFGEENEFQAKNVIKETTGTKFDVYHREEFLSSFEIPAYGDHNVLNALSVIALCDYEGLPVEDVKNELKTFEGVKRRFSITEKGNQVLVDDYAHHPSEIRATVNAARQKYPDKKVVAVFQPHTFTRTRTFLQGFADSLNLADEVYLCDIFGSAREKTGNLTIADLAHKTKGNHIIKEEHTEELLKYPEAVILFMGAGDVQKFQAAYEKVLDHEFLTEADLKKSAIN

SEQ ID NO: 1468 - protein, 783 aa, Listeria monocytogenes
MGWFKDFFFGDMDEEIDTYEDTSSRKVEKKAKQRASEVLPKSNVTAIKTKERTIRNERPVAYKTAPKQKHMQPVKRQMKTQMVYQYPKGEFRFPLIPDKQKSQPIQPKKQPITERQVAETQPVKEETRKRPFTATDVPSPVYAFNKRPSKFEFAVTEAEELSTIQEDLTITPVDLLDSAEAETIAFDAGLNRQIEEEVVSVPVMEEVVTEQPEVEVNPEPVEQQEPARVSLITEEPAQTKTTTRSKQVESNRQEQLLKSRIPFNVMMVKKDKQALQKEDAQEINVQQPVEIEAEQTNIVQQTQVATASYPMNYEFPSFGLLHPPVSKREDDSWLQMQQEMLDETLENFNVQASVVNRTQGPAVTRFEVQPEKGVKVSKITNLTDDIKLNLAAKDIRIEAPIPGKSTVGIEIPNQTSRPVMLSELMNTEAFQTSASPLTAALGLDISGTPIITDLQKMPHGLIAGATGSGKSVCINSLLVSLLYKATPDQLKLLLIDPKMVELAPYNRIPHLVSPVITDAKAATVALKWAVEEMERRYQLFSHTGVRNMEKYNEYASHPDHTGEKLPYILIVIDELADLMMVAPNDVEESISRIAQKARACGIHMIVATQRPSVDVITGLIKANIPTRVSFSVSSQIDSRTILDASGAEKLLGKGDMLFLPSGASKPVRLQGTFVSDEEIDAVVAHVRSQGEADYIFEEQELLVKETAKENTDELFEEACDFVLSQNAASTSLLQRHFRIGYNRAARLMESLENHQIVSGINGSKPRDVIITKDQLAKLRNKES

SEQ ID NO: 1469 - protein, 83 aa, Listeria monocytogenes
MANLSELPNIGKVLEQDLIKAGIKTPAELKDVGSKEAFLRIWENDSSVCLSELCALEGAVQGIRWHDLDEAKKSELKKFHQSL

SEQ ID NO: 1470 - protein, 205 aa, Listeria monocytogenes
VIVNAFYNEKGVGDTLLIETGEVTFENREWERRGDVARIFDRETKEVAGFNIFNSSKYFDITANGKVELTEELVALMNRVIEKAGFEPEIVADLSPKFVVGYVESKEKHPNADKLNVCKINVGDKVLQIVCGAPNIDVGQKVVVAKIGAVMPSGLIIKPSNLRGEDSFGMVCAARELAIPDAPTEKGIMVLEESATIGEAFPVNF

SEQ ID NO: 1471 - protein, 266 aa, Listeria monocytogenes
MAKMTTLKMKERLEKELQAPNRQFSYNRDNDALTVVQSGKKVTLAIPQIIANYENDGDAAVEKIVYYVEEGFRAAAGNVELENNKANVYPVVRATSFPGETKAGEVLLTDDHTAETKIFYAVDLGKSYRFIEESMLKKAQLTHEEIREAAFNNLANLEIPLKKDSVNGNDFYFVRTNDGYDASRLLNEAFLREMREKLTGEMVLAVPHQDVLIIGDIQDNTGYDVLAHMTMDFFADGLVPITSLPFVYNNGKLEPIFIMAKNRLKE

SEQ ID NO: 1472 - protein, 103 aa, Listeria monocytogenes
MKNLESVEQFNAIKSEGKSVFMFSADWCGDCKFIEPVMPEIEAENEDFSFYHVDRDEFIDLCADLAIFGIPSFLAFEDGEEVGRFVSKDRKTKEEINDFLAAI

SEQ ID NO: 1473 - protein, 357 aa, Listeria monocytogenes
MEKETLAMFKELTELQGTSGDEHRIRAFMRKELEPVSDEIIQDGLGGIFGVRHGAEEGPRVLVAAHMDEVGFMVTQITDNGLLRFQTIGGWNPQVLQAQRVQIMTPIGPVIGVVASVPPHLLSEAERSKPTDPKNLLIDIGADDKADAEKIGIKPGQFIVPVAEFTPLANPKKILAKAWDNRYGVGLAIELMKELKGESLPNTLFAGANVQEEVGLRGAGVSANMIKPDLFFALDASPANDTTGNKSQFGQIGQGFLLRIFDRTMIMHRGMREFLLDTAETNKIPYQYFVSPGGTDAGKVHTSLSGIPSAVIGVPARYIHSSNSILHVDDYAAAKEMITTLIRGLDKTTYETIKNNA

SEQ ID NO: 1474 - protein, 103 aa, Listeria monocytogenes
MNWKAFIAGVGAGAAAGHLVYHYLLSDKTISGDVILEKVKDAFKQEGPIEGSWIQLKKQHYKKFAIDTFVYHGGITCIREGEKKQFEFIADANTGTIIDVYLA

SEQ ID NO: 1475 - protein, 82 aa, Listeria monocytogenes
MDIEQKKALVTRFAKIEGHVRSIKTMTEEERDLETIMQQIAAVKKAMDAAAKLIYTEQMKELIEQGETDEAVIKKKIDSFIR

SEQ ID NO: 1476 - protein, 283 aa, Listeria monocytogenes
VDSIQIGKIKIYWLRGGYTHFDGGAMFGVVPKPLWEKKYPVNDKNQLANVTDPMFFQYLGKNYLIDSGLGNRRLTEKQKRNYGVTEESFVLEDLAQLSIAPEDIDYVLMTHLHFDHVLGLTGISEEGNDYSIFPNAEIWTSETEWEEMQHPNIRSKATYWQENWLRIEGQIHTFTKEKEFNDAIKMTHTGGHSNGHSVIWLESDGEKAIHMADIFPTFAHQNVLWVTAYDDYPMTSISAKQAIFKQTFGANYWFLSYHDSRFRAVQIAENGDVKAELKIEHRN

SEQ ID NO: 1477 - protein, 214 aa, Listeria monocytogenes
MRVKHKPWAKDRLEEFPAIYIKNPEDFKGQWHEVFGNDNPIHIEIGSGKGQFISGMAKANPEINYIGIEMIESVLVSALDKAIEVDVPNLRLVARDAKLLEDCFEKGEIAQIYLNFSDPWPKKRHTKRRLTNPTFLTIYERLLPKAGEIHFKTDNRSLFEYSLVAFSEYNMLLTFVSLDLHNSDYEGNIKTEYEEKFSAKGFPIYRLEAKFDRN

SEQ ID NO: 1478 - protein, 260 aa, Listeria monocytogenes
MKDNFFGREYDIAPAGGETGQAFVATHEDEKFFLKRNSSPFLAALSVENIVPKLVWTRRVENGDVITAQKWVNCHILTREEMVGPRVAKLLAKIHRSENLQHMLAKIENCYFSADQLLSLVKVNTRANNNLSKEIIEAVHYLEQNLSAAQTNNYVVCHGDVNHNNWIISEENELFLVDWDGAMLADPANDIGMILYQYIPREDWVSWLSNYGTTLTEELHRKLKWYTICQTVMQLTTNQTDEANERAKQIFQNAIEDDEV

SEQ ID NO: 1479 - protein, 427 aa, Listeria monocytogenes
MLDVKLLRNNFDEVKQKLQNRGEDLGEFEKFGELDKRRRTLIVETEALKSQRNEVSQEIAKLKREKQDADAKIEEMRVVGDRIKTLDIELREIDEKLDMILMSIPNIPHESTPVGESEDDNVEIRKWGEVRAFDFEPKAHWDLGTDLDILDFENAAKVTGSRFVFYKKLGARLERALINFMMDLHSNEHGYEEMLPPYMVNRASMTGTGQLPKFEEDAFLIEAEDYFLIPTAEVPVTNYHREDILKAEDLPRKYTAFSACFRSEAGSAGRDTRGLIRQHQFNKVELVQFVKPEDSYVALEKLTGNAEEVLRRLELPYRVLSMCTADLGFTAAKKYDLEVWIPSYNSYREISSCSNFESFQARRANIRFRREPGSKPEYVHTLNGSGLALGRTVAAILENYQDADGSVRIPKVLQGYMGGIEKIELPK

SEQ ID NO: 1480 - protein, 198 aa, Listeria monocytogenes
MTINLILLSLLAYVIGSIPSGLWIGKIFYKKDIREFGSGNLGATNSFRVLGIKAGSIVTVMDILKGTVATLLPFFFQLNVDHHFWLLTGAFAIIGHSFPLFAGFRGGKAVATSAGVILAYAPLLFVAALVVFLVTLKLSKYVSLSSMIGALAALIISLFMGDWILIVLVACIALFVIWRHRANITRIRNGEEPKIKWM

SEQ ID NO: 1481 - protein, 290 aa, Listeria monocytogenes
MIKLENEVLLVEMKTAGAELTRIFHKDTGLEYLWNADSKFWGRHSPVLFPTVGRLVEDTYLVDGKPYHLGQHGFARDRDFQVVEQTEKSVRFELDADEDSLAVYPYKFKLSIIYTIEKNTVAVSYEVENTDNKRIYFSIGAHPAFNLPLTDGTTFEDYYLDFGTEENLETLCLEGPYRSGEIKKVVDEAARYLPLNYDLFKNDALIFEALKQKEMTIKSDKTPHFVKVSFPEFPFVGVWTAKAGTPFLCIEPWYGIADGAGESVELRDKAGIEHLEPEAVFASEYEITVG

SEQ ID NO: 1482 - protein, 103 aa, Listeria monocytogenes
MAFGVKRDEMELWKEKAARGEIAIITHYWLDDRFPESKTVTKVACVDLKKLQQWGKQYGLAPDWIDNRRKNFPHYDLFGEMQLVVLKKEKAFEQIERFHLEEK

SEQ ID NO: 1483 - protein, 122 aa, Listeria monocytogenes
MGVVYHNNYLVWMEIGRTRLIEKLGFRYFDMEEAGYLSPVLDVHIHYGKPLRYGQRAVVKTWIKGYDGLRVTYGYEICYEDTNEVAITGETQHVCVTKEDFRPVSLRRTFPNWHEAYLKALE

SEQ ID NO: 1484 - protein, 259 aa, Listeria monocytogenes
MTLLEKTRKINAMLQNAAGKTVNFKEMADTLTDVIEANTYIVSRKGKLLGYSEALPIENDRMKQMLTERQFPEEYTQSLFNVGETSSNLEVSSQYTAFPIENSELFTKGLTTIVPIVGGGERLGTLILSRLESNFTDDDLLLAEYGGTVVGMEILHEKAEEIEEEARSRAVVQMAISSLSYSELEAIEHIFDELNGKEGLLVASKIADRVGITRSVIVNALRKLESAGVIDSRSLGMKGTFIRVLNDKFLVELEKLKNN

SEQ ID NO: 1485 - protein, 214 aa, Listeria monocytogenes
MTFVAPSLLAADYMNMANSIKEAEDAGADYLHIDVMDGHFVPNLTFGIDMVEQIGKTATIPLDVHLMLSNPENYIEKFAAAGAHIISVHIEAAPHIHRVIQQIKAAGCKAGVVLNPGTPASVLDAVLADVDLVLQMTVNPGFGGQAFIDSTIKNMRYLDNWRRKNHGSYVIEVDGGVNAETAEKCKQAGVDILVAGSYFFGATDKAACIQGLKK

SEQ ID NO: 1486 - protein, 139 aa, Listeria monocytogenes
MRNELEDKILAILEQHQVGVLTSVQGDYPHARYMTFLHDGLTLYTPSGKELPKTDEVRRNPHVSVLIGYESPGSAFLEINGLASLEEDESIKERIWENISKEWFRGEDSPSFVVIKIVPEQIRILNSDDDGPDTLDLIG

SEQ ID NO: 1487 - protein, 469 aa, Listeria monocytogenes
LTNLTLRNQLTPKQIVEKLDQYIIGQNGAKKSVAVALRNRYRRQLMDESIRDEIIPKNILMIGPTGVGKTEIARRIAKIVRAPFSKVEATKFTEVGYVGRDVESMVRDLVEVSVRLVKEEKMQLVRVKAEKNAEKRLIKLLAPSQKKKQTTSQNPLEALFGGMNQPDESPEEEVDQELKNKRSQIEWRLQNGELDDEIVTVEVKEQQNPMLDMMRGAGMDQMNGMQDALSGMFPAKKKKRKVTVREAKKILFEDEASKLIDADELAAEGIHRAEQMGMIFIDEIDKIASKEGGGNAQVSREGVQRDILPIVEGSQISTKYGTVNTEYILFIAAGAFHMSKPSDLIPELQGRFPIRIELDKLTQEDFYKILTEPDNALIKQYKALLKTEGIDLIFTKEAVERIAEIAFQVNQDSDNIGARRLHTILEKLLEDLLFEAPEINMESIKVTENYVNEKLAPIMQNKDLTQFIL

SEQ ID NO: 1488 - protein, 179 aa, Listeria monocytogenes
MELHATTIFAVQHDGKAAMAGDGQVTLGESVVMKHTAKKVRRLFHDKVIAGFAGSVADAFTLFEKFEAKLNEYNGNLERASVELAQQWRSDSVLRKLEAMLIVMDKDTLLLVSGTGEVIEPDDGILAIGSGGNYALAAGRALKRHNGGQMEAKDIARHALEIASEICVFTNDHITVEEL

SEQ ID NO: 1489 - protein, 300 aa, Listeria monocytogenes
MIQEGKLEQQFFDYLHSERNYSVNTSTAYENDLLDFRRFLNEQAITTYQQVTFLDVRIYLTELKQKSFSRTTVARKISSLRSFYTFLLRENVINENPFTYVSHAKNQLRLPKFFYSEEMEALFQVVYEDNETLTLRDRVLLEVLYGTGIRVSECAGILLPDLDTSYQAILIRGKGNKERYVPFGAYAEDAITDYLPERVNLMSRYKKSHDALLVNHYGDPLTTRGIRYCLTKIISKASLTRKIHPHMLRHTFATDLLNNGADMRTVQELLGHASLSSTQIYTHVTKEHLKSTYMKHHPRA

SEQ ID NO: 1490 - protein, 434 aa, Listeria monocytogenes
MEKSVNVIGAGLAGSEAVWQLVNRGVKVDLYEMRPVKQTPAHHTDKFAELVCTNSLRANGLTNAVGVIKEEMRMLDSIIIEAADKASVPAGGALAVDRHEFSGYITDKVKNHPLVTVHTEEVTTIPEGPTIIATGPLTSPALADEIKQLTGEEYLYFYDAAAPIIEKDSIDMDKVYLKSRYDKGEAAYLNCPMSEEEFNAFYEALVTAETAALKEFEKEVFFEGCMPIEVMAKRGIKTMLFGPLKPVGLEDPKTGKRPYAVLQLRQDDAAGTLYNMVGFQTHLKWGEQKRVFGMIPGLENAEIVRYGVMHRNTFINSPTVLEPTYQLKTRNDLFFAGQMTGVEGYVESAASGLAAGINAANFIQEKELVVFPTETAIGSLAHYITSASKKSFQPMNVNFGLFPELETKIRAKQERNEKLAERALNAIKKVAEEL

SEQ ID NO: 1491 - protein, 692 aa, Listeria monocytogenes
MADYLVIVESPAKAKTIEKYLGKKFKVKASMGHVRDLPKSQMGVDTENDYEPRYITIRGKGPVLKELKQAAKKAKKVYLAADPDREGEAIAWHLANSLELDQSDKLRVVFNEITKEAVKESFKTPRKIDMDLVNAQQARRILDRLVGYNISPILWKKVKKGLSAGRVQSIALRIIIDREKEINNFKPEEYWTIDGNFLKGKKKFQANFYGVNGKKKKLSTADDVKEVMSAIKGKSFDVTDVTKKERLRNPAAPFTTSSLQQEAARKLNYRTRKTMMLAQQLYEGITLGKQGTVGLITYMRTDSTRIADSAILEASNYIKETYGPEFSRNHKRSDKNAKGAQDAHEAIRPTSAMRSPQEVKEYLTRDQLRLYRLIWERFIASQMTPAVLDTMRVDLDNNGVNFRANGSKIKFHGFMKVYVESNDDNTEEKENILPDLKKGDKVQSESLEQRQHFTQPPPRYTEARLVKTLEEIGIGRPSTYSPTLDTIQRRNYVSLTNKRFIPTELGEIVNEMIEEYFPEILDVKFTANMESELDEVEHGEVEWVKVIDEFYKRFEPNVIKADAEMEKIEIKDEPAGIDCDLCGAPMVYKMGKYGKFLACSRFPDCRNTKAIVKEIGVTCPKCEKGHVIERKSKKKRIFYGCDRYPDCDYVSWDKPVERACPKCEKRALVEKKLKKGVQVQCTNCDYKESTQQ

SEQ ID NO: 1492 - protein, 286 aa, Listeria monocytogenes
MDFKQRNTWLKLASCKSISAKKRAVIWQKLKELDQYEMAAHTFVESFFPVDKRAQILMEIETAEVFFLEGITPIWILEDSYPALLREVYEAPPILFCKGNIDLLQRQAIAIVGTRQMSEYGRKACMKIASELSAHDLTIISGMAIGIDTIAHKATLNKNGATIAVLGSGVNKIYPKKNEFLAKEIAKEGLLLSEYLPSQEAKRWHFPERNRIISGLAIGTVIIEAAERSGSLITADIALEQNRQVFAVPGNIFIDTWQGTNYLIQEGAKLVMNADHIIEEFFQIKP

SEQ ID NO: 1493 - protein, 261 aa, Listeria monocytogenes
MSDSISVIKEKLSEVTSENDPFFQKCIQDERKGVEKLVQSVRRKWEKEAKLLVKLKEMTQYETDLFQQGYKYIAGVDEVGRGPLAGPVVAAAVILPADFSVVGINDSKQLSEAKRDALFEKIKKEAIAIGVGIIEHDVIDQVNIYEATKLAMCEALNQLTPEPDFVLIDAMPLRYTEAELSLIKGDTKSISIAAASIIAKVTRDRLMQMYDEKYPGYDFANNMGYGTKKHLLGLDTIGICPIHRMSFSPVKESKLHFDSLN

SEQ ID NO: 1494 - protein, 190 aa, Listeria monocytogenes
VILIIDHNDSFTYNLYQYFLELQEEVQVVSATSFSLEAFQQLAPEMVVLSPGPGSPEDFPVSLALLGKIQVPILGICLGHQIIGHFFGAKVVPANVPVHGKTSVISHTGEGLFADLEPAFQVTRYHSLVIDPTTVPVNLKVTAVTEDGVIMGLVHATKPIHSVQFHPEAILSENGHAILKNFVRLGRNVK

SEQ ID NO: 1495 - protein, 287 aa, Listeria monocytogenes
MTIQWFPGHMAKARREVTEKLKLVDVIFELVDARIPLSSSNPMLEEIIHQKRRVIILNKADTADEKTTKEWIDYFAEKGLPAVAVNAQEGKGLFKIEQAAEKLMAEKFDRLRSKGMKPRAIRAMILGIPNVGKSTLINRLAKKNIARTGNKPGVTKAQQWIKVGKTLELLDTPGILWPKFEDQEIGYKLALTGAIKDDLLQMEEIAGYGLRFLENHYPDRLQTWLKVETVSEDPIETLAFIAEKRGLLDRYNDPDYSRAAETVVREIRQQKLGRMSFDFPNWEDEVE

SEQ ID NO: 1496 - protein, 180 aa, Listeria monocytogenes
LKEKNLKRLWSWIWAAVLAVLIAVIIRFYLFVPILVDGISMMPTLHNDDRVIINRFGNVDRFDVIVFRESDGKEYIKRVIGLPGDTVEYKEDQLYINGKKYNEPYLDTYKEKLKDGYLTDDYSSKDQLDGGKIPKDTYFVLGDNRRASKDSRIIGPIPFSKVLGTTPICYWPIEDAKLID

SEQ ID NO: 1497 - protein, 189 aa, Listeria monocytogenes
MTDQNEKKPKKKSGAHQLLSWVLVIVAALAIALVIRNFVVAPVKVEGTSMVPTYQDGDRIFIEKISKPDRFDIIVFDEPPMIGSGEHFIKRVIGMPGDKVAFKNGELYLNGKRKVESYLPEGTLTLWNPDPTQKPYIADYTLEDMTGESTVPKGKLFVLGDNRGGSSDSRVFGFIDDSMVNGTVIQFGK

SEQ ID NO: 1498 - protein, 718 aa, Listeria monocytogenes
VKLAKKWRDWYIESGKKYLFPLLLVCFAVIAYFLVCQMTKPESYNVKLFQVAEKTIRSPQTVEDTEKTKEERTKASDAVEDVYVYNRETGQNRVALIQSLFAYVNEVNAEAQEKDTKNKEKAKKENKPAPAPTSTEDKLKNLKDKLSSNVSEKITSNISDEVFTTLIEAKSKDFNVMEDVVTTEVEKSMENKIRDENLNSVKIRARDDIELSAIPAYYKNVSKALVSYAIVPNEVYDEEQTDARRKEAAQSVVPVKILQGQVIVQEGQIVDRETYRQLKMLHLLDQKMPVKQYAGFAIFIIALAAILFLYTKKQTQPKAKKMQTMLIFSSVYLVSLFMLFIILFLETQNIANIAFLFPAAFAPMILKILLNEKYAFLSVIFIAVTSLLTFQNDATSGITIFILLSGATSVVMLRDYSRRSAIMLSGFMVGLINMIYVLLLLLINNSTLLQVSTLMALGYAFLGGFGAFILGVGVIPLFETIFGLLTTSRLVELANPNHPLLKKILMKAPGTYHHSMMVANLAEACADKIGANSLLVRVGCFYHDIGKTLRPPYFVENQLQGINPHDRLTPEQSRDIILSHTKDGAEILKENHMPQPIIDIALQHHGTTLLKYFYFKAKETNPDVKEADYRYSGPKPQTKEIAIINISDSVEAAVRSSTEPTMAKITEIIDGIIKDRFLDGQFTECDITIQEIKIIRDTLIATLNGIYHQRIQYPDDKD

SEQ ID NO: 1499 - protein, 319 aa, Listeria monocytogenes
MLNEFNEVVELSDDTNIQDLFGNNNKNIELLEELLQVKIITRGESLSITGEEEPVQHTTAVLNELILTVKRGIHIDGRDIAQAVKMQRNGTLIYFHTLFEEEITKNAKGTPIRPKTFGQRTYIQMIKKHDIVFGVGPAGTGKTYLAVVMAVDAWKKGNVSKIILTRPAVEAGESLGFLPGDLKEKVDPYLRPVYDALYDIFGTEHTTRLMDRGVIEIAPLAYMRGRTLDHAFVILDEAQNTTIAQMKMFLTRLGYDSKMIVNGDMTQIDLPKGATSGLVNAEQVLKDVKDIGFVYFEHHDVVRHPLVAEIIKAYEGKQN

SEQ ID NO: 1500 - protein, 148 aa, Listeria monocytogenes
LTLLDKLNEDMKQAMRDKEKEKLSVIRMLKAALQNEAIHQGVKDLTPDDEVTVISRELKQRRDSLAEFDKAGRSDLSDKVRSEIVIVEDYAPKQLTPEELENIVKATIEEVGASSKADFGKVMSAIMPKVKGKADGGAVNQFVKKYLS

SEQ ID NO: 1501 - protein, 255 aa, Listeria monocytogenes
MQRYFVTSELENDNDTLAITGENFHHIARVMRMKESDQVFIVFPSKKTCIAAITAINEEEVLLNLVKWLEEDTELPIEITIASGLPKGDKLELIIQKSTELGAHKFISYKAERSVVKWDDKKVIKKIERLQKIAQEAAEQSHRTIIPEVHYAASFKELMFGHVHYDFVIAAYEESAREGEDSALASLFQTMKPGQSVLCIFGPEGGISEKELLLLEEANAKLAGLGPRILRTETAPLYVLSAASFYFDLYKNKNR

SEQ ID NO: 1502 - protein, 314 aa, Listeria monocytogenes
MEWSEVEVHTTNEAVEPVANVLTEFGAAGVSIEDVADFLREREDKFGEIYALRREDYPEDGVIIKAYFLKTTEFVEQIPEIEQTLKNLSTFDIPLGKFQFVVNDVDDEEWATAWKKYYHPVQITDRITIVPSWESYTPSANEIIIELDPGMAFGTGTHPTTQLCIRALSNYLQPGDEVIDVGTGSGVLSIASAKLGAKSILATDLDEIATRAAEENITLNKTEHIITVKQNNLLQDINKTNVDIVVANILAEVILLFPEDVYKALKPGGVFIASGIIEDKAKVVEEALKNAGLIIEKMEQQGDWVAIISKRGVE

SEQ ID NO: 1503 - protein, 568 aa, Listeria monocytogenes
MSLLRFDFEGDTKIFENPLYELVAYDLAEVLPIMKAAENAQKSGKYVAGFVSYEAAPAFRSNLKTKKPSESMPLVWFGVYDNFTDTATETPDSSPLSFKMDTSFPEYTEKIEQIKAEIAAGNTYQINYTVRLQSDVPNNFSSQATYETLQQIGKANYTALLSTSDFEIISASPELFFKWKENLLTTRPMKGTIRRGITEQADLEAHDWLKNDPKNRAENVMIVDLLRNDLGMIAVPGSVKVPQLMTLEPYPTVWQMTSTITAETPPETDLTAVFKALFPCGSITGAPKARTMEIISELEDSPRGVYCGTIGFLEPNGNAIFNVPIRTIAITDNKATYGVGGGIVWDSEAASEFSEIHAKSAILEKATKFSLIECLRIENGELFRTEYHLKRLQTSADFFGIPFNREETEKLWTKTAQKNTTGTYKMRFLLHPEGAHDLALTKIDTKNKRITAQLADKPVLSNDLFLYHKTTHRKIYEDLKNTQTDETLLWNEQGELTEFINGNIVLGINGCFFTPPVTSGLLSGTMRAELLAKNKISEKTLAKKDLLEADYVWLINSVRGFVEVEIKQ

SEQ ID NO: 1504 - protein, 377 aa, Listeria monocytogenes
MAKRDYYEVLGISKSASADEIKKAYRKLSKQYHPDINKEAGADEKFKEISEAYEALSDPQKRAQYDQYGHVDPNQGFGGGGAGGGFGGGGFSGFEDIFDTFFGGGGRQQDPNAPRQGSDLQYTMRLKFKEAIFGKDAEIEIPREENCDTCHGSGAKPGTTPEKCSHCGGKGSINVEQNTPFGRVVNKRTCQYCNGTGKEIKEKCPTCHGKGRVTKTKKIKVKVPAGVNDGQQMRVSGEGEAGINGGPNGDLYVVFVVIPDEFFEREADDIYVEVPITFVQATLGDEIDVPTVHGKVRLKIPSGTQTGTTFRLRGKGVPHLRGNGTGDQHVIVKVIVPKKLDDKQKEILREFASTTGDKVDEQTSGFFDKMKRAFKGD

SEQ ID NO: 1505 - protein, 613 aa, Listeria monocytogenes
MSKIIGIDLGTTNSAVAVLEGGEAKIIPNPEGARTTPSVVGFKNGERQVGEVAKRAAITNPNTISSIKRHMGTNYKETIEGKDYSPQEISAIILQYLKSYAEDYLGETVDKAVITVPAYFNDAQRQATKDAGKIAGLEVERIINEPTAAALAYGMDKTETDQTILVFDLGGGTFDVSILELGDGVFEVHSTAGDNELGGDDFDKKIIDYLVAEFKKDNGIDLSQDKMALQRLKDAAEKAKKDLSGVTSTQISLPFITAGEAGPLHLEVTLTRAKFDELTHDLVERTIAPTRQALKDANLSASDIDQVILVGGSTRIPAVQETIKKELGKEPHKGVNPDEVVAMGAAIQGGVITGDVKDVVLLDVTPLSLGIETMGGVMTTLIERNTTIPTSKSQTFSTAADNQPAVDIHVLQGERPMAKDNKTLGRFQLADIPPAPRGIPQIEVSFDIDKNGIVTVRAKDLGTGKEQNIVIKSSSGLTDEEIEKMVQDAEANAEEDKKNKENAELRNNADQLVFTVDKTLKELEGKVEEEEVKKAEAARDELQEALKGEDFDAIKEKTESLNEIVQNLSVKLYEQAAAEQQAAGGAEGQEAPQNDDVVDAEFEEVNDDDKENK

SEQ ID NO: 1506 - protein, 191 aa, Listeria monocytogenes
VSEKKNKKERLADEIEQEELNILDEAEEAVEEEATADTLTEEQAKILELENKLDEVENRYLRMQADFENVKKRHIADRDASQKYRSQSLAQDLLPALDSFEKALATTSDQEEVKQILKGMEMVYNQILIAFEKEGIEVIPAVGEQFDPNFHQAVMQDSDENAGSNEITAELQKGYKLKDRVIRPSMVKVNQ

SEQ ID NO: 1507 - protein, 345 aa, Listeria monocytogenes
MLTERQLLIFRAIIDHFTWTIQPVGSKNLLKEKGLPYSSATIRNEMGVLEEYGFIEKTHSSSGRVPSEKGYRFYVDYLLQPKKLDKSDRQMIRSFFSENYYEMEGLIQNSALMLSDLTNYTSILLGPEATKNHLSGFRFVPINNFQAMLILITDQGHVDNHLVTIPEGTTLSDIERMVNILNERLVGLSLDDLKVQIPMEVKELLGKHVRNYESFMHVFSDSFAQASQQKVYFGGKTNILNQPEFHDINKVREMLHLMEEEQDVYELFRDIPDGLQVKIGRENNNSLMEDCSIITATYNIAGERVGGIVLLGPTRMEYSRMMGLVDVMSRDLTDVLTKLYRDNQN

SEQ ID NO: 1508 - protein, 385 aa, Listeria monocytogenes
MINTNLSSNESSAVYIHIPFCEHICYYCDFNKVFLEGQPVDEYVDLLIKEMELTVAKGPIAPVDTVFVGGGTPTTLNEAQIARLCTAIHNTLPLKKDIEFSFEANPGDLSLSKLQAMQDHGVNRISMGVQSFNNELLKKIGRIHTVKDVYQSVENMRKIGFENVSIDLIFSLPGQTEADFQDTLKQALDLDLPHYSAYSLIIEPKTIFYNLMQKGKLFLPGQDAEANMYDLLLNEMEKHGRKQYEISNFAKEGFQSKHNITYWSNEHYYGFGAGAHGYVGNTRYSNFGPIKKYMEPLQENILPTFQQKELTLKEKMEEEMFLGLRKVDGVDKKHFKQKFGQDLDATFANAIQKTTAKGWLENNEENVALTRSGRFLGNNVFQEFL

SEQ ID NO: 1509 - protein, 342 aa, Listeria monocytogenes
MKNNVLVTGGTGFLGMHIIFQLLQQGYQVKTTVRSLKSKEKVIEILQNNGITDFTHLSFVELDLSKDEGWKEAMLDCEYVLSVASPVFFGKFKNEEELISPAIEGITRILQAAKEAKVKRVVMTSNFGAIGFSNADKNSITTEAYWTDELAKGLSAYEKSKLIAEKEAWKFMENETELEFATINPVAIFGPSQSNHVSGSFDLLKNLLNGSMKRVINIPLNVVDARDVADLHIRAMITPEANGERFIASADGEISMADIAHLLQRERPELVDKMPKKTLPNAAIRAAALFSKHAKEGELMINMNRQISNSKARDVLGWKPISTKEEAVLAAVDSLAKYGLLD

SEQ ID NO: 1510 - protein, 145 aa, Listeria monocytogenes
MTYSIKEVSKIFNLSIYTLRYYDKQGLLPFVSKNQSGYREFTESDLNLIHTICCLKNTGMPLKQIRTYIDYCMEGPVSIEARKQLLLDHRAAVLKSLEDLTENLKEVDVKIAKYSSPDAVEIITAERNYVSMEKKKHDLIYPYNI

SEQ ID NO: 1511 - protein, 608 aa, Listeria monocytogenes
MNKEEMNARQKKIRNFSIIAHIDHGKSTLADRILEQTGALTHREMKNQLLDSMDLERERGITIKLNAVQLKYKAKDGETYIFHLIDTPGHVDFTYEVSRSLAACEGAILVVDAAQGIEAQTLANVYLALDNDLEILPVINKIDLPAADPERVREEIEDVIGLDASDAVLASAKSGIGIEDILEQIVEKVPEPSGDVNKPLKALIFDSVFDAYRGVIANIRIMDGVVKAGDRIKMMSNGKEFEVTEVGVFSPKATPRDELLVGDVGYLTAAIKNVGDTRVGDTITLANNPAEEALDGYRKLNPMVYCGLYPIDSSKYNDLRDALEKLELNDSALQFEAETSQALGFGFRCGFLGLLHMEIIQERIEREFNIDLITTAPSVIYHVNLTDGSNIVVDNPAEMPEPGVIESVEEPYVKATVMVPNDYVGAVMELAQNKRGNFITMEYLDDIRVSIVYEIPLSEIVYDFFDQLKSSTKGYASFDYELIGYKASKLVKMDILLNAEKVDALSFIVHRDFAYERGKIIVEKLKELIPRQQFEVPIQAAIATKIVSRSTIKALRKNVLAKCYGGDVSRKRKLLEKQKEGKKRMKQIGSVEVPQEAFMAILKMDESK

SEQ ID NO: 1512 - protein, 308 aa, Listeria monocytogenes
MRVIDTHCDALYKLQAGKGKYTFQDAEELDVNFERLIEAKMLLQGFAIFLDEDIPVEHKWKKAVEQVNIFKQHVLHKGGIIHHVKKWCDLENLPEDKIGAMLTLEGIEPIGRDLDKLTQLLDGGVLSVGLTWNNANLAADGIMEERGAGLTRFGKDIIHLLNERKVFTDVSHLSVKAFWETLEQAEFVIASHSSAKAICAHPRNLDDEQIKAMIEHDAMIHVIFHPLFTTNDGVADIEDVIRHIDHICELGGMKNIGFGSDFDGIPDHVKGLEHAGKYQNFLETLGKHYTKEEVEGFASRNFLNHLPK

SEQ ID NO: 1513 - protein, 447 aa, Listeria monocytogenes
VRLESNFVQKQQQKQSQKLNMTQQLSQSIAMLQFATADLVAFLEDKALENPLIEVIPGSDFATDFSYSSRKSAGSSDDTDWLEQIADNKMTLADALKEQLHLMDVTQTQKIIVLYLIESLNDNGYLQIDLKDVSAALLMDDSSVLEGLEILQSMEPAGVGARDARECILLQIERSPDAPYIAYDVIQKFFTEFAEKKWKKIASEMDVSLQDIQEVSDYIQTLNPKPGSEFESERVQYVVPDLILLQHEDEFAVSLAKQFLPQVRFQEAYYETMRATEEKDVAQFLREKAGEFDWIKKGIEQRESTLQRVGEAIVSHQKAYFLDNSAHLQPLTLKEVAEELGVHESTVSRAVNGKYMETTNGVYELKRFFASGLQKKSSENENIGDISSTTIKKLVQEFVAAEDKLKPLSDQKIVDMLAEKEIQVSRRAIAKYRLELNIPSSSKRKRF

SEQ ID NO: 1514 - protein, 348 aa, Listeria monocytogenes
MSDLINIQKKLLPDVLMIMQKRYQILRSIYFSEPVGRRTLAGMLGMSERVLRGEVEFLKAQGLVEIASSGMTVTKEGLVVFRDLESVMNQLSGLHSMEEQLAKKLQIKKCLVVQGDSDDTPWVREEMGRVAVEQLDMALTEKRNIVAVMGGSTMATVAEMMTTDFAKGRELLFVPGRGGIGEDLDNQANTICDKMATKTNTKHRVLYVPEQLGEEAYRSLLKEPAIQEGLRLVQSANAIILGIGDALAMAKRRHTGEDVLEKIIHRKAVGEAFGYYFDEQGEVVHKVPTFGLQFEDLAQIPHIIAVAGGTSKAKAIKSYMKSAPKNTILITDEGAAKSLLKGSNTLLK

SEQ ID NO: 1515 - protein, 336 aa, Listeria monocytogenes
MTVKVGINGFGRIGRLAFRRIQNVEGIEVVAINDLTDAKMLAHLLKYDTTQGRFDGEVEVHDGFFKVNGKEVKVLANRNPEELPWGDLGVDIVLECTGFFTAQDKAELHIKAGAKKVVISAPATGDMKTIVYNVNHETLDGTETVISGASCTTNCLAPMAKVLEDKFGVVEGLMTTIHAYTGDQNTLDAPHPKGDFRRARAAAENIIPNTTGAAKAIGEVLPTLKGKLDGAAQRVPVPTGSLTELVTVLDKKVTVDEVNAAMEAASDPETFGYTSDQVVSSDIKGMTFGSLFDETQTKVLTVGDQQLVKTVAWYDNEMSYTAQLVRTLEYFAKIAK

SEQ ID NO: 1516 - protein, 396 aa, Listeria monocytogenes
MAKKVVTDLDLKDKKVLVRVDFNVPMKDGKITNDNRIVAALPTIEYILEQNGKAILFSHLGKVKTEEDKEGKSLRPVAVRLSELLGKEVKFVPTTRGPELEKAIDELKDGEVLLFENTRFEDIDGKKESKNDPELGKYWASLGDVFVNDAFGTAHRAHASNVGIASNLESAAGFLMEKEIKFIGGVVDNPARPLVAILGGAKVSDKIGVIENLLTKADKVLVGGGMTFTFMAAQGQEIGKSLLEADKVELAKGLLEKAGDKLVLPVDAVVSKEFSNDAPFHTVSADSIPADEMGLDIGQATIDLFTKELQGAKTVVWNGPMGVFELSNFAKGTIGVCEAIANLTDATTIIGGGDSAAAAMDLGFADKFTHISTGGGASLEYLEGKELPGVASISDK

SEQ ID NO: 1517 - protein, 251 aa, Listeria monocytogenes
MRKPIIAGNWKMNKTAAKAGQFAEDVKNNVPSSDAVESVVAAPALFLQELVRLTEGTDLRVSAQNCYFEDEGAFTGEISPFALADLGVSYVIIGHSERREYFHETDEDINKKAHAIFKHGMTPIICCGETLDQREAGQTDTWVRGQIRAALAGLTEEQVIKSVIAYEPIWAIGTGKSSTSADANETCAVIRAEVADAVSQKAADAVRIQYGGSVKPENIADYLAESDIDGALVGGASLEPASFLALLEAVK

SEQ ID NO: 1518 - protein, 573 aa, Listeria monocytogenes
MKVLFHHLKKYKLQATLSTLFVVVMVISQLWQPKLLQQVLDAIMKDDMDEISSIGALLIGIAAVGLIAGILNTILSAKVAQGVGADIRESSFRKIQTFSFSNIEKLSTGNLVVRQTNDITQVQNLVMLSLQSLTRIPIMFIGAFILAMFTLPELWWVIIVLVVLVVLIVVFTFGSMGKHFAIIQKLIDRVNSIAKENLAGMRVVKSFVQEDNEIGRFTTVSDKLTRHTIIVGTLFSVMIPAFMLVSNLAIVVSIFFVGDMAADNPEVIGAIASFMNYLMQIMMAIIIGGMLMMMASRALISLKRITEVLETEPDITYNENAPEQDLEGTVEFRNVSFKYDGDDTPALEDISFKASVGEMVGIVGATGSGKSTLAQLIPRLYDPTEGEVIIGGTNLKDINKKTLRSTVSFVLQRAILFSGTIADNLRHGKKDATAEEMEHASKIAQAKEFIDKQAKLYEAPVSERGNNFSGGQKQRLSITRGVIGSPKVLILDDSTSALDAKSEKLVKEALNKELDDTTTFIIAQKISSVIQADKILVLDKGKLVGVGSHKELLKENETYREIYDTQKGKEVTA

SEQ ID NO: 1519 - protein, 510 aa, Listeria monocytogenes
MSKSPVAIIILDGFGKRAETVGNAVAQANKPNFDRYWADFPHGELKAAGLDVGLPEGQMGNSEVGHTNIGAGRIVYQSLTRIDKAIEEGEFQENKALNNAFTHTKENNSDLHLFGLLSDGGVHSHINHLVALLETAKDKGVKNVYIHAFLDGRDVAPQSSLEYLETLQKAISDLNYGAIATVSGRFYAMDRDKRWERVEKAYKAIVSAEGEKFEDPIELVKASYANDKNDEFVVPAIITKDGKPVATVKDNDAVIFFNFRPDRAIQLSNAFTDKEWDHFDRGADHPKNIKFVTMTLYNPSIDAEVAFEPIEMKNVIGEVLSNEGLSQLRIAETEKYPHVTFFMNGGRNEEFPGENRILINSPKVETYDLQPEMSAYEVTDALVEDIKNDKHDAIILNFANPDMVGHSGMLEPTIKAIEAVDENLGRVVDLILEKGGSAIIFADHGNSETMSTPEGKPHTAHTTVPVPVIVTKKGVTLREGGRLADVAPTMLDLLGVKKPAEMTGESLIQK

SEQ ID NO: 1520 - protein, 430 aa, Listeria monocytogenes [sequence omitted]

SEQ ID NO: 1521 - protein, 57 aa, Listeria monocytogenes
MLMKVKNSQASKVLETPKIKDAVVHEKSHPLAEKHSVQKKIINADMPQQQFHRRLMK

SEQ ID NO: 1522 - protein, 239 aa, Listeria monocytogenes
MIAEINGINLFYQIIGKGEPILLIHGNGQNHRSLKRMIDDLSTNHQVIAVDSRAHGKSEAGNTPLDFEVMALDMLSLLDYLKIDKYKVIGYSDGGIVALVMGKMQPNRQIASVVIGTNYHVNQIRFLPDLFCRVAYGAAFLLAPFSRFFERMKRQLALTIYHPHMSEADLQKISAPLLAVVGEYDLISSKDTRKMVHSVQHGEMVIVRNGLHYLPRQKPKQLLQLIHSFFSNLSAEIHK

SEQ ID NO: 1523 - protein, 500 aa, Listeria monocytogenes
MDEKEKNLNENSENESTPKREVEDTLHTPESAQPVQETPIVEGVTPEGEKFAGATEDAAEASSTNAFFEEASNKESEPARPAPGPRRAGTTGGGAVPPNRVNNGGSGNGNGEPPKRGKHFIGYFLTALIGVIIGGLIIFFVAWDNGDNADTTSNSNNKATKVEKVSVDTTSDVTKAVDKVQDAVVSVLNYQSSSSLDGTTTSEQEASSGSGVIYKKANGKAYIVTNNHVVADANKLEVTFTNGKKSEAKLLGTDEWNDLAVLEIDDKNVTTVAAFGDSDSLKLGEPAIAIGSPLGTEFSGSVTQGIISGLNRAVPVDTNGDGTEDWEADVIQTDAAINPGNSGGALINIEGQVIGINSMKISMENVEGISFAIPSNTVEPIIEQLETKGEVERPSLGVSLRDVDTIPETQQKNILKLPDSVDYGAMVQQVVSGSAADKAGLKQYDVIVELNGQKVTNSMTLRKILYGNDVKIGDKVKVKYYRDGKEKSTDIKLEAAKTTT

SEQ ID NO: 1524 - protein, 276 aa, Listeria monocytogenes
MFANKILTEKDTDQIRFSILASGSSGNATLVETGDQKILIDCGLSGKKMEGLFAQVGRDMNDLDAILITHEHSDHIKGLGVLARKYKLPIYANAKTWKAMDNMIGEVSSDQKFQFDMETVKNFGSMQVESFGVSHDAIEPMFYIFHKGNKKFVMITDTGYVSDRMKGHIAGADAYLFESNHDVEMLRMGRYPWNVKRRILGDEGHVSNEDAAIAMSEVITDQTKRIYLGHLSKDNNMKELARMSVTQTLMAEGIDVGGKLEIFDTDPDNATSIFTI

SEQ ID NO: 1525 - protein, 279 aa, Listeria monocytogenes
MDWRKTQMIFIVTLLILNVFLAVIFFNKQLSDDPDTLGNETLEERLKADNISHPDLSTKPTSGSIFTTERAAFTTKDVSDLTGQAITLKDNNKQIYSVLQTPVKAGKKGSNPEFQKFMESDVYRGESYQFWNYDKDARTLTFNQLINNNMVLFDEAGQITFYLDQDDRVISYEQTWMSKQDDLKDKTNLMSATDALEAVYQHGELKQDSDVVSATFGYYTTVQLPSGNVYFPVWCFEVKHSGETNYVLVNAKDEQVINQSENKSTTEPGAELSSRQKAK

SEQ ID NO: 1526 - protein, 440 aa, Listeria monocytogenes
MMKKTGFRSFILTILVVLSIVLSYFIWKGQPDYEAINVKEVEKTTIDKTMTTSQVFKPYKLAVNANENNYQSLDADLLNELMAQGKAFSFSEVVLASKKSSEDYEKLIHKNGTIEIIFPNNIPFSIFAQIFQVEGEGLESAFFNRIVFDINKTDTGLHSVYFTNDDQENIYQSSLQNKDIDKIEKIVKKNESKLTQNDKLISNKRNLFLSSEKTKLNRKKYIIDSLEINLFTSALFQDSGTVKSEGNTYTDGSSVIEMDTDNKVLEYVNPSQERTNPEDLSSVKRAGLIQDSFNFVNDHAGWTGDGAYYFTGYAAESATTNFSLFIDNLQVYNENGMADISVTEGLEAVYKYMRPFFRLDTDVPGEKKEVTLPSSYSVYSALAQNPNVKAEEIEDIVPGYHMTRSESSGMNRLVTLEPTWLYKYHDKWFIFQPDAEKAGE

SEQ ID NO: 1527 - protein, 610 aa, Listeria monocytogenes
MHKMRFFQSVQFKLVIMYLLLIIVAMQVIGAYFVRELEGQLEKNFQDSITNSITLLDYNAREEIIKNSDNSVKLQNDIRELLVDYSRASSNLIEVRIVDDKGKILGTSNLNNQGIVGQKSNDPLVKRTLSLGTTSEDKIYKDESNKNNRVWVNVSSIKNKGQVIGAIYLVADIESVYKQVDDITNIFITGTLIAMIITAVLGILLSRTITKPIVEMKRQAYAMARGNYSRKVKVYGVDEIGELADSFNTLTKRVQEAQAMTEGERRKLSSVLAYMTDGVIATDRRGKVILINTPAEKMLRVKHESANGRSIIDVLDIGDTYQFEDLMEVDGSLTMDRSTLDKPYVLRANFSVIQRETGFNNGVIAVLHDITDQEKVDQERRDFVSNVSHELRTPLTSMHSYLEALSDGAWEDKEIAPRFLEVTQNETERMIRLVNDLLKLSRMDGGREQLEKSFVNFTDFFNHIIDRFEMMKKETIMFKRHIPREPVIIEIDEDKVMQVLDNIISNANKYSPDGGRISFYLKKFEDEIEVSIADEGLGVPDEDLANVFDRFFRVDKARSREMGGTGLGLAIAREVIEAHGGRIWAERNKNKGTIIKFTLPYSDLPEDDWE

SEQ ID NO: 1528 - protein, 237 aa, Listeria monocytogenes
MAEKKILVVDDEKPIADIVKFNLNKEGFDVYCAYDGDEALELVEEVQPDLILLDIMLPGRDGIEVCREVRKKYDMPIIMVTAKDSEIDKVIGLELGADDYVTKPFSNRELIARVKANLRRHSQVSSSTAEEEENSELEIGSLIIHPDAYVASKRGETIELTHREFELLHYLAKHMGQVMTREHLLQTVWGYDYFGDVRTVDVTVRRLREKIEDNPSHPAWLVTRRGVGYYLRNPEQE

SEQ ID NO: 1529 - protein, 393 aa, Listeria monocytogenes
MKISKRLQNLPDQFFSSLVEKVGKKVAEGHDVINLGQGNPDQPTPKHIVEAMKTASEKPLNHKYSLFRGKQELKQAAADFYAREYNVTIDPNTEVAILFGTKTGLVELPMCLMDPGDTMLLPDPGYPDYLSGVVLGEVQFEKMPLIAENDFLPDFTKIPEDIAEKTELMYLNYPNNPTGAVATADFFEETVAFAKNHNIVVAHDFAYGGIGFDGKKPISFLETNGAKEVGIELYTLSKTYNMAGWRVGFAVGNSEVIEAINLIQDHMYVSLFPGIQDAAIEALTGDQACVRELTARYENRRDAFISACREIGWEAVAPAGSFFAWMPVPEDFTSSEFADYLLEEVSVAVADGSGFGEFGEGYVRVGLLMDEERLEEAVTRVSKLHLFDKVTQQ

SEQ ID NO: 1530 - protein, 590 aa, Listeria monocytogenes
MKEFKQISRFFWHYLRGYKPQLFVILIAVVFATYLQVKAPQYIGNAVQELGDYVVNLMQTGVDDKSDFIHIIWMLILCYVLLAAATFIQSIIMTGVAGKSTNRMRIGLFRKMEKLSIRFFDSRNDGEMLSRFTSDLDNISNTLNQALIQVLSNVALMIGVIIMMFQQNVELAFVTLISAPFAIIIATVIIRKARKFVDVQQDELGVLNGYIDEKISGQKIIITNGLEEETIDGFVKQNNIVKNATYKGQVYSGLLFPMMQGISLLNTAIVIFFGGWLALNGDLERTAALGLIVMFVQYSQQFYMPLTQISSQYSLLQLAITGARRVSEVFAEEEEVERENLQTIDGINKGVKLDHVDFAYDPAKPVLKDVSIDVSKGKMVALVGPTGSGKTTVMNLLNRFYNVDGGAILFDDIDIRDIRLDSLRKQVGIVLQDSVLFTGTIRDNIVFGKPEASDDEVINAAKQANIHDFIMNLEKGYETEISDENNIFSVGQKQLMSIARTIITNPSLLILDEATSNVDTVTESRIQKAMDNVISGRTSFVIAHRLKTILDADHIVVLHQGEVIEQGNHDELMKAEGFYSELYHNQFVIE

SEQ ID NO: 1531 - protein, 314 aa, Listeria monocytogenes
MIEIEKPKIETIEISDDAKYGKFVVEPLERGYGTTLGNSLRRILLSSLPGAAVTSIQIDGALHEFSVIEGVVEDVTTMILNIKKLALKIYSDEEKTLEIDMQGPGVVTAADINYDSDVEILNPDLHIATLSDNAKFHVRLNATRGRGYTPADQNKRENMPIGVLPVDSIFSPVIRVNYQVENTRVGQSTNYDKLTFDVLTDGSISPEEAVSLGAKILSEHLSIFVNLTDEAQKAEIMIEKEESHKEKVLEMTIEELDLSVRSYNCLKRAGINTVQELADKSEDDMMKVRNLGRKSLEEVKVKLADLGLSLRNEN

SEQ ID NO: 1532 - protein, 129 aa, Listeria monocytogenes
MARKTNTRKRRVKKNIESGIAHIRSTFNNTIVMITDTHGNALAWSSAGSLGFKGSRKSTPFAAQMAAESAAKSAQEHGLKTLEVTVKGPGSGREAAIRALQAAGLEVTAIKDVTPVPHNGCRPPKRRRV

SEQ ID NO: 1533 - protein, 121 aa, Listeria monocytogenes
MARIAGVDVPREKRIVISLTYIYGIGKQTAKEVLAEAGVSEDTRTRDLTEEELGKIREILDRIKVEGDLRREVNLNIKRLIEIGSYRGMRHRRGLPVRGQNTKNNARTRKGPSKTVAGKKK

SEQ ID NO: 1534 - protein, 72 aa, Listeria monocytogenes
MAKEDVIEVEGVVQETLPNAMFNVELENGHKVLATVSGKIRMHYIRILPGDKVTVELSPYDLTRGRITYRFK

SEQ ID NO: 1535 - protein, 215 aa, Listeria monocytogenes
LKLVLMGLPGAGKGTQAEQIVEKYNIPHISTGDMFRAAMKNNTELGRKAKSFMDNGDLVPDEVTNGIVRERLSEDDAKDGFLLDGFPRTVEQAQELENILSDLGTELDAVINIDVEKDVLMKRLTGRWICRTCGKTYHEIYNPPKVPGKCDLDGGELYQRDDDKKETVEKRLNVNMKQTKPLLDFYSEKGKLHNINGEQEIKDVFVDVEKILASF

SEQ ID NO: 1536 - protein, 431 aa, Listeria monocytogenes
MFQTLVNFFKVADIRKKILFTLAMLVIFRIGTFVPVPGVNAAALQSSMDGGILGFLNTFNGGALKNFSIFAMGVMPYITSSIIVQLLQMDVVPKLTEWSKQGEMGRKKLNQLTRYMTIGLGLVEAFGMAYGFNRMSSAGLVIEPSIGRYAIIAIVLTTGTMFLMWLGEQITVKGVGNGVSIIIFAGIVARIPDGVRQLYVSQIENAGDQLFLHVLTLVGVGVAILAIVVAVIFFQQALRKIPIQYSKRVAGAKQSGAQATHLPLKLNSAGVIPVIFASAFIITPQTILTFFDQSNDVVKVLKDVFDYTKPIGMILYVALIVAFTYFYAFIQVNPEKVADNLKKQGGYIPSKRPGRETQAYLTSVLYRLTFVGAIFLSAVAILPTIGTTVFSLPQSLAVGGTSLLIVIGVALDTTKQLEGQLVKRNYRGFIK

SEQ ID NO: 1537 - protein, 79 aa, Listeria monocytogenes
MNFNFFVRSGFIGLILLFVIQVLGIIRGLLIQSGFMDGSIDQTLLGTKLIIVPIIFFTISVIFFLLWFYKDYQKSRFPN

SEQ ID NO: 1538 - protein, 146 aa, Listeria monocytogenes
MKLHELKPSEGSRKERNRVGRGTGSGNGKTSGRGHKGQKARSGGGVRLGFEGGQLPLFRRIPKRGFTNINRKEFAIVNLDVLNRFEDGTEVTPELLVETGIIRNEKSGIKILSNGNIEKKLTVKANKFSAAAKEAIEAAGGKTEVI

SEQ ID NO: 1539 - protein, 167 aa, Listeria monocytogenes
MPEQIDGNKLDLEERVVTINRVAKVVKGGRRFRFTALVVVGDKNGHVGFGTGKAQEVPDAIRKAVEDAKKNMVLVPTVDTTIPHTVVGHFGGGEILLKPASAGSGVTAGGPVRAVLELAGVADVSSKSLGSNTPINMVRATIDGIKQLKNAEDVAKLRGKTVEELLG

SEQ ID NO: 1540 - protein, 119 aa, Listeria monocytogenes
VITKIDKNKVRKKRHARVRSKISGTESRPRLNVFRSNKNIYAQIIDDVNGVTLASASNLDKDFGSAESKVDAASKVGELVAKRASEKGITSVTFDRGGYLYHGRVKALAEAARENGLEF

SEQ ID NO: 1541 - protein, 178 aa, Listeria monocytogenes
MSRIGKKTIVIPAGVTVTLNGSTATVKGPKGELVKEFNPEITIKIEGNEINVSRPTDNKNHRALHGTTRAILNNMVVGVSEGYEKKLELIGVGYRAQKQGDKLVLNVGYSHPVEFVAPKGVDIEVPANTQVIVKGYNKEHVGELAANIRAVRPPEPYKGKGIRYEGEHVRRKEGKTGK

SEQ ID NO: 1542 - protein, 132 aa, Listeria monocytogenes
MVMTDPIADFLTRIRNANMVKHDKLELPASKIKKEIAEILKREGFIRDVEYIEDDNAGTIRVFLKYGATGERVITGLKRISKPGLRVYAKSTEVPKVLNGLGIAIVSTSQGVLTDKEARAKQVGGEVLAYVW

SEQ ID NO: 1543 - protein, 179 aa, Listeria monocytogenes
MNRLKDQYLKEIVPALMSKFNYDSVMEVPKIDKIVINTGVGDATANAKVLDSAVEELALITGQKPVITKAKNSIAGFRLREGMPIGAKVTLRGERMYDFLDKLVTVSLPRVRDFRGVSKKAFDGRGNYTLGVREQLIFPEIDYDQVSKVRGMDVVIVTTAKSDEESHELLTQLGMPFQK

SEQ ID NO: 1544 - protein, 103 aa, Listeria monocytogenes
MHVKKGDKVKVITGKDKGKSGKVLAAFPKKDRVLIEGINMVKKHTKPSNVNPQGGILNVEAPIHVSNVMLIDPKTGEPTRVGYEVKGDKKVRVAKKSGEVIDK

SEQ ID NO: 1545 - protein, 445 aa, Listeria monocytogenes
VKNIIKKTGILIMAASLAVSGFLVSPKAAQAAEAPNVNANAAIAIEESTGKILYSKDADKLMGIASMTKMMDEYLLLEAIDKGKLKWDDKVTISEYAYKVSQDTSLSNVPLRLGEEYTVQELYEAMAIYSANGAAIAISEKIAGSEKEFVDAMNKKADELNLGEHQFVNATGLNNEDLKGGQQVGGPKDENKMTARGMAKLAKHLINDYPDVLKTASTTKKEFRKGTSDQIDMTNWNWLLPGLIYGRKGVDGLKTGTTDYAGMCLTATAVQDGMRVITVVLHANGGAPGEHTSARFDETNKMLDYAFNNFKVKEVQKAGSKVKNPSTIAVDKGKEDTVGLVTKDAVKLVVPKNGNAPKLNTKVTMKEKTIEAPVKKGTEVGKMEVSLKDGDKLGYVDGKQTETIDVLTASDVEKANWFMLSTQAVGSFFTGMGNYVSDGVKGWFN

SEQ ID NO: 1546 - protein, 122 aa, Listeria monocytogenes
MIQQESRMKVADNSGAREVLTIKVLGGSGRKTANIGDVVVCTVKQATPGGVVKKGEVVKAVIVRTKSGARRQDGSYIKFDENACVIIRDDKSPRGTRIFGPVARELRENNFMKIVSLAPEVL

SEQ ID NO: 1547 - protein, 144 aa, Listeria monocytogenes
MLVPKRVKYRREFRGNMRGRAKGGTEVAFGEYGLQAVEASWITNRQIEAARIAMTRYMKRGGKVWIKIFPHKSYTSKPIGVRMGKGKGAPEGWVSPVKRGKIMFEIAGVPEDVAREALRLAAHKLPVKTKIVKREEIGGEANES

SEQ ID NO: 1548 - protein, 218 aa, Listeria monocytogenes
VGQKVHPIGMRIGVIRDWDSKWYAEKDYADFLHEDLRIRDYVAKRLSDASVSRVEIERAANRVNITIHTAKPGMVIGKGGSEVEALRKNLNELTQKRVHINIVEIKRADLDAKLVAENIARQLEGRVSFRRAQKQAIQRTMRAGAKGIKTQVSGRLGGADIARAEHYSEGTVPLHTLRADIDYAWEEADTTYGKLGVKVWIYRGEVLPTKKNNVEGGK

SEQ ID NO: 1549 - protein, 118 aa, Listeria monocytogenes
MASEVTSAKAVAKTVRIAPRKARIVIDLIRGKQVGEAIAILKYTPRSASPIIEKVLKSAIANAEHNYDLDINNLVVEEAFVDEGPTLKRFRPRAQGRASAINKRTSHITVVVSEVKEG

SEQ ID NO: 1550 - protein, 92 aa, Listeria monocytogenes
MGRSLKKGPFVDDHLMKKVEAAAESEKKQVIKTWSRRSTIFPTFVGQTIAVYDGRKHVPVYVQEDMVGHKLGEFAPTRTYRGHAGDDKKTKR

SEQ ID NO: 1551 - protein, 435 aa, Listeria monocytogenes
MFILTMGLNHHTAPIDIREKLVFKETEEEMALVTLQQEKSILENVIISTCNRTEIVAVVDQIHTGRYYLKRFMANWFQMDMEKIEPYLFFHEETEAVNHLYKVTAGLDSLVLGETQILGQVKHAFEIAKQTETTGTLLNKLFREVVTFAKKVHHHTKINENAVSVSYAAVEVAKKLYGSLDNKKIVLVGAGEMSELALQNLAGSGIADITIINRTKSNAELLANQFQAKVGAYENMNEHLMLADIVLVSTSATEPIIKQAAMQDLMEQKASSMLVIDIGLPRNVEHDCSYIPNFHLYDIDDLAGVVSANSLERQRIVLELENTIEVEVRNFFEWEKQLGVVPVIRALREKALDMQEVAMTSLENKLPGLTEREYIQIGKHMKSIINQMLKQPISELKEMSVEEDATTSIEHFKRIFGLSETDVTVIEKEQAETRS

SEQ ID NO: 1552 - protein, 309 aa, Listeria monocytogenes
MKRKIIVGSRRSKLALTQSNWVINKLKENYPEFDFEIKEIVTKGDRILDVTLSKVGGKGLFVSEVEQALSDEAIDFAVHSMKDVPSSLKEGLIIGAIPKRESPLDCFVFNQVNSLDELPQGSVIGTSSLRRAAQLLKHRPDFVIKPIRGNIDTRLQKLHAENFDAIILAKAGLARMGWLENTTLKLEDIPPEVCLPAVGQGALAIECRESDQQIRDMLTSIHHEETGICVEAERVFLKKLNGGCEIPIAGFATRANEFVQFKGLVGNADGSIILESEQVGANPSEIGNKVAEDLLSEGADTIIKELRNV

SEQ ID NO: 1553 - protein, 240 aa, Listeria monocytogenes
MSKKVVLTREASKNKPWQTYFSQNGYEVMSIPLIKTQPIKINLTREQQETDWLFLTSANAVEYFFTNQYERSNYKIAVIGEKTKEKLAEFGHEPSFVPSIYQSEVFLEEWLNENPEKTSILLPQSNLSRTIIKDTLIEKGYIVFSIELYETIFPEASKKLLTEQLKLNETQIIVFASPSAWKNFYSIAKSFPAQKEKWHIASIGSITTEAILADGWEVKYQPKTFTMKHLADLIIQEELK

SEQ ID NO: 1554 - protein, 324 aa, Listeria monocytogenes
MKNQFDRHRRLRKTKTMRDLVRETVLHTDDLIYPIFVKDGKEPKTEVVSMPGVFQYPLHELEEEMRVVESLGIKAVILFGIPAEKDAVGTQAYHDHGIIQEATRLIKKSFPKILVVADTCLCEFTDHGHCGVIENGEILNDESLELLKQTAVSQAAAGADIIAPSNMMDGFVQVIREGLDEAGFYDIPIMSYAVKYASAFYGPFRDAAGSAPQFGDRKSYQMDPANREEALREAKSDEQEGADFLIVKPSLSYLDIMRDVKNNTNLPVVAYNVSGEYAMVKAAAQNGWIDEEKIVIEMLTSMKRAGATLIITYFAKDVSKYLNK

SEQ ID NO: 1555 - protein, 429 aa, Listeria monocytogenes
LQNYSKSEKAFKEAKKVLPGGVNSPVRAFNSVDASPVFMDHGKGAYITDVDGNEYIDYVLSWGPLILGHTDPAVVNAITKAALKGTSFGTPTEIETELAKLVIERVPSIEIVRMVSSGTEATMSAIRLARGYTKREKILKFEGSYHGHGDSLLIKAGSGVATLGLPDSPGVTKGLAADTITVPYNDIEGAKLAFEKYGEEIAAVIVEPVAGNMGVVPPIEGFLEGLRELTTKFGSLLIFDEVMTGFRVDYYSAQGYYVVTPDLTCLGKVIGGGLPVGAYGGKKEIMEQIAPAGSIYQAGTLSGNPLAMNAGFETVRQLTPQHYDVFRTLIKRMEEGLTEISARRQVPLSINKAGSMFGFFFTDQKVINFDTAKTSNLEFFRNYYREMLGQGIFLPPSQFEGVFISTMHTENEIDKTLEAFDTTCKILRG

SEQ ID NO: 1556 - protein, 883 aa, Listeria monocytogenes
MTTEHNEINMPTKYEPSNVEAGKYKWWLEKEFFKAEGNTDKEPYSIVIPPPNVTGKLHLGHAWDTTLQDIITRMKRMQGFDTLYLPGMDHAGIATQAKVEAKLKESNISRYDLGRENFVDKTWEWKEEYAEFIREQWEKLGLGLDYSRERFTLDDGLSDAVKKVFVTLYNKGLIYRGQYIINWDPEAKTALSDIEVIHKDIEGSFYHLKYPLTDGSGYLEVATTRPETIPGDTAVAVHPKDERYQHLIGKTIMLPILNREIPIVADEYVEREFGSGAVKITPAHDPNDFEVGNRHNLPRIIVMHEDGTMNENAGKYDGLDRFVARKEIIQDFKDLGLFIKQEPHLHSVGHSERTGAVVEPYLSLQWFVKMEPLAAEALELQKTENKVNFVPARFEKTYETWMDNIHDWCISRQLWWGHRIPAWYHKETGEIYVGEKEPENLSEWEQDEDVLDTWFSSALWPFSTMGWPDTESPDFQHFFPTNTLVTGYDIIFFWVSRMIFQSVEFTGERPFKDTLIHGLVRDSEGRKMSKSLGNGVDPIEVIDKYGADSLRYTLATGSSPGQDLKFSYEKVESTWNFINKIWNASRFVLMNLDGMKYNEIDLSNVTEVSDKWILTRLNETIQAVTSLGEKYEFGEVGRTLYNFIWDDFCDWYIEIAKIPLYGEDEVAKQTTRSVLAYTLNATMRLLHPFMPFVTEEIWQNLPHEGESITIAEWPKVNEQQIDTKSSTAMATLVEVIRAVRNIRSEVNTPLSKPIVLEIKPKDTTYKEILEQNISYIERFCNPEQVTISFDVEASKTAMTAVVSGAEIFIPLEALIDLNVEIARLEKELEKWNKEVARVQGKLNNERFISKAPESVVAEERLKEKDYLDKKASVLERIETLKEV

SEQ ID NO: 1557 - protein, 429 aa, Listeria monocytogenes
MTLNSYEEALDWIHGTLRLGIKPGLARMEYMMEKLNHPEKANKWVHIAGTNGKGSTLTFVRNALEEAGYKAGTFTSPYIEVFNERISVNGEPISDEMIVSLANRIKPIAEELEKTVYGPPSEFEIITAMMFLCFADYVSIDIGIIEVGLGGRLDSTNILVPLVSVITTIGMDHMEFLGDTIEQIASEKAGIIKPGIPVVSGAIQKEAQEVIAEIATKNKSNVTQLNKAFSMHNENGNITYKTIYGEEISNLSIGLFGLHQLNNAAVAIKVLQYLNTFSTFEIDLAAIRKGLEKAFWPGRMEKIISNPFIMLDGAHNPEGIKTFAHSVQKYPGPKKIIVSILADKNYQEMLAMLKSIPNAEIILTTFDYPRAMMAEEVIQIGKNEGISLNPDWQQALNNLYETETNTKIFITGSLYFISEVRKYLLASIR

SEQ ID NO: 1558 - protein, 144 aa, Listeria monocytogenes
VKKYLSMVKRWDIIIILSLCILSFLPIAIFSYVKANEPAPANGKKELVAVISVDNKEYKTVTLTGHKGTESFDVKQPDGHTNTIEVSGEEIRISKANCNDQVCVRTGAIDKQGDTVVCLPHKLVIEVKASDGSSGDSDDPIISS

SEQ ID NO: 1559 - protein, 236 aa, Listeria monocytogenes
MIYFLLAIYSAVFMSFIQVAGECFPVKKSFLFRFSECNYCQKKLAFYHIIPIFSFLFFRGKSRCCERPIPIIYFLMELVTPIYILLLYIQFSFSYSFLLYYIIYYFLAFFFITDIFYLYVPNSILIVFFCVLATIAILYNQSLMDLIYSGGISCLFYLLFFIIFRKGIGLGDIKILIILSTFLGFKIGYYIFFLAIIMGTIILLTALMLKKVKKNKQVPFVPYIFVSFLLISILMK

SEQ ID NO: 1560 - protein, 224 aa, Listeria monocytogenes
MLTHEISENEKPREKLQNYGIEALSSSELVALIIETGTKNESVLTIANRIIMKFKNVGEMQYASIEEFQLVNGIGIAKASKIMAAIELGRRISIVTEQEEVVVRCPEDAVKLVMPELAFLFQEHFHCLFLNTKNQVIYRQTIFVGGLNASIVHPREVFRLALRKSAASIMCFHNHPSGDPTPSSEDLLVTKRLAEAGNIVGITLLDHIIIGKNKYISLKEKGYF

SEQ ID NO: 1561 - protein, 337 aa, Listeria monocytogenes
MFGFGNKDIGIDLGTANTLVYMKGKGIVLREPSVVAMKKDTQEIVAVGSDAKNMIGRTPGNIVAIRPMKDGVIADYDTTAAMMKYYIQKAGKSVNASKPRVMICVPSGITGVEKRAVIDATRQAGAKDAFTIEEPFAAAIGAGLPVGEPTGSMVVDIGGGTTEVAVISLGGIVTSRSVRTAGDDLDEVIINYIRKKYNLLIGDRTAEAIKMEIGSASPKGLDLSPFSIRGRDLVTGLPKTIEITPEEISEALADTVAAIIDAVKGTLENTPPELSADIMDKGIVLTGGGALLRNLDTVISEETKMPVIIADEPLDCVAIGTGKALENMDMYKRKKMN

SEQ ID NO: 1562 - protein, 295 aa, Listeria monocytogenes
MPQFFLNKRLIILLISIIVLVALVGFSLRDRENASWPEQFVKDVVGFGENIVAKPTSFISGAVDGVVDLKNTYTENQHLKERLEELAQLESEVADLKKENKDLKESLDITDSIRDYDPLNASVISRNPTNWNDQVEIDKGSSDGVKPDMAVTTPSGLIGKVTTTGAKSATVELLTSSDVKNRVSAKVQGKENAFGIINGYDSDTKLLELKQLPYDMKFKKGQKVVTSGLGGKFPAGIFIGTIEKVETDKMGLSQTAFIKPGADMYDLNHVTVLKRSAEAGTTDDDTTSSDTTGGQ

SEQ ID NO: 1563 - protein, 172 aa, Listeria monocytogenes
MNVKKNIALPAIMVVTFILEGVFSLQFANGLFNDRHLFIPHFLLIMLTIMTCFYKRNTTLAYAFILGLLFDIYYTGVMGIYFAIFPFTVYITDKFMKVLQNNILLVGLIAIFNIILTESLVYAFYYLIGTTTMSIPVFIDQRLWTTILINLAFFLVVFFPFRLFLDRLVKSE

SEQ ID NO: 1564 - protein, 225 aa, Listeria monocytogenes
MKKNVQIKGTKDGISIFLSDKASISELQQELTQLLADQKQNPYSGEKLEVQVQIGNRLFSEEEELEISTIIHENSQMEISAFYSNVMSKDEAKKWKENDQIFSMATIIRSGQVVQVPGDFLLIGDVNPGGQIRSNGNVFVLGNIKGIIHAGFEGNENAVVAGKFLYPSQVRIADKVYGFDSEDYKEVTETDLFSAFVNDAGEIVIDGIHKIRKIRPEISNFQGGR

SEQ ID NO: 1565 - protein, 555 aa, Listeria monocytogenes
VKHNQLIIETDIPAKMRDGVTLYADIYRPADAGEYPVLLTRLPYSKSYGLHFIRPNILAEQGYVVIVQDVRGRYTSEGDFVPYIAEVDDGYDTIEWAANLPYANGDVGMFGLSYYGYTQILAAISGNKHLKAIAPIMAQNSMTDVFNDHDGALELGMWETWNLESMLPNMLARTYKTHDELEEAANTLMKNLDNLDTLYQFKPYEDWPAIGQNEMPYFSELLNYEPTHDHWRKIDAKSNYDKINVPGLHVAGWYDCFLDKTIANFKNGHLRGLGDKLIIGPWTHANFTQMIGDRDFGMAATKWGEANMHARHIEWFNHWLKNEPLPASAPVNYFVMGLNDWKTAENWPPQNANMTPLYFKNEKVSAEFTPPATSSEAKFSYDPENPVPSNGGGTLHKALHADGPHDQQQIELREDVLCYSTEPLKEAIEVTGPIQVKLWAKTDAPNTDFTAKLVDVFPDGTAFNLADGIIRAAKQHGANVQNNINEYTIDLWATSNLFQKGHQIRIEISSSNFPRFDPNPNTGDSFINSTESQIANQTIYHSPEYPSHILLPIIR

SEQ ID NO: 1566 - protein, 104 aa, Listeria monocytogenes
MELKHVIPNMEKTFGQLEFAGEGKVEQRRINGKPTILSRSYNLYSNIQRADDIVVILPAEAGEKHFEIEQKVKLVNPRITAEGYKIGTRGFTNYVMYADDIVKV

SEQ ID NO: 1567 - protein, 124 aa, Listeria monocytogenes
MRLAEGIVIEKEKTFGTLKFSALRREVKIVDDEGNVTEQVKERTFDLKCKEQGRMIQVSIPASAGVKNFDYNAEVEIINPIADTVATATFQGADVDWYIKAEDIVLKRPAQNQQADQKQNHDKK

SEQ ID NO: 1568 - protein, 466 aa, Listeria monocytogenes
MRKLFQYRGKKIKQSDKHLLSNFFTVSMVTLFSLVMIPFHLKAIMAVDWETVTLDDFIKQLQTPYFLGSVITALFVCLIVGFLYYYYKIDNIKQLEHRQKLAKMVLQNGWYEAEQIQSEGFFKDLPSSKTKERISHFPKMYYYLKDGLIHINVEITMGKYQDQLLQLENKLETGLYCELVDKELKDSYIEYTLLYDTIASRIQIDEATAHDGRLKLMDSVYWEYDKLPHMLIAGGTGGGKSYFILTIIEALLHTNANLYILDPKNSDLADLATVMDNVYFRKDDMLQCINQFYEDMIARSEAMKQHPNYKTGENYAYLGLPANFLIFDEYVAFMDMLGRDSAEVISKLKQIVMLGRQAGFFLILACQRPDAKYLGDGIRDQFNFRVALGRLSELGYGMMFGNDTQKQFFLKPIKGRGYVDTGTSVISEFYTPKVPKGYDFLKQIGKLANKSLADPVADEVKATGSD

SEQ ID NO: 1569 - protein, 394 aa, Listeria monocytogenes
LNNKTSWIEELKEKRMAYGLSQNKLAVASGITRQYLSDIENEKVIPTEQVKTALLDSLERFNPDNPLEMLFDYVRIRFPTDNVEKIIEEILHLNIDYMIHEDFGYYSYPEHYRFGDIMVMVSYDITKGVLLELKGKGCRQYENFLLAQHRSWYDFFTDCLEVNGVFKRLDLAINDKVGILDIPELARKSEQEECISIFRTFKNYRSGELVHRDEKSDMGNTLYIGSLKSEVYFCIYEKDYEQFIKNDIPLEDPEVKNRFEIRLKNDRATHAIQDLLAYRNAEKTAFEIINRYIRFADKDTTKRRSQWQTSERWEWFIGKNRGELRLTTKPEPYSYERTLNWLRHQVAPTLKVASILDVLNETDIIPAMIRDANLTEKHEKLIEQQNLAVEDVIV

SEQ ID NO: 1570 - protein, 96 aa, Listeria monocytogenes
MSGLTAELYELGFNCGIELEIYIQDTGIYTSLIIEGFRKGVDEPYQYDFYKQTFYPHYPNKVTVYGEHLRPSQLIERVERYFINRKKYMSERRNNT

SEQ ID NO: 1571 - protein, 166 aa, Listeria monocytogenes
MEEMRIYVANLGKYNEGELVGAWFTPPIDYEEMEEKIGLNGEYEEYAIHDYELPFDIDEYTPISEINRLCEMIMELDGSPIYDELKDIQGMWFSSLEELLESKDDIICYSDCDSMEDIAYYYVEDGLMGEIPERLQMYLNYQAIGRDLEINGNFLVTSHGVFEYCN

SEQ ID NO: 1572 - protein, 131 aa, Listeria monocytogenes
MKKIRSYTSIWNVEKVIYAINDLQLPFPITFTQMTWFIVSLLVIVMFGSLPPLSLIDGALLKYIGIPVGLAWFMSQKTFDGKKPYGFLKSILTYFIRAKTTYAGKAVKLQKQQFNEAITTVRSELYYGISN

SEQ ID NO: 1573 - protein, 816 aa, Listeria monocytogenes
MAYPIKYIENNLVFNNDGECFAYYELIPYNYSFLSPDEKYQVHDNFRQLVAQSRDGKIHALQLATESSIRATQERSKLEVKGRLKEVAHRKIDEQTEALVSMIGDNQVDYRFFIGFKLLLNEQELSIQSVSQEIKKAVQEFLNGVNHKLMGDFVSMSNAEIDRFSKMENLLESKISRRFKIRKLDKNDFGYIIEHIYGQTGTPYEEYEYHLPKKYQDKEVLVKKYDILKPTRCLIDESQRYLKIIHEDETTYVAYFTINSIVGELDFPSSEIFYYQQQQFTFPIDTSMNVEIVANKKALTTVRNKKKELKDLDSHAWESDNETSNNVIDALDSVNELETTLDQSKESMYKLSYVVRVSAKDLDELKRRCDEVKDFYDDLSIKLVRPFGDMLGLHGEFIPASKRYINDYIQYVTSDFLAGLGFGATQTLGEHEGIYVGYNLDTGKNVYLKPALASQGVKGSVTNALASAFIGSLGGGKSFSNNMLVYYAVLFGGQAVIVDPKAERGKWKETLPEIAHEINIVNLTSDDENKGLLDPYVILSRKKDSESLAIDILTFLTGISSRDSDKFPVLRKAIRNVTQSEQRGLLLVIDELRKEDTSISNSIADHIESFVDYDFAHLLFSDGNVTQSISLEKQLNIIQVADLVLPDADTSFEEYTTMELLSVAMLIVISTFALDFIHTDRSIFKIVDLDEAWSFLQVAQGKTLSMKLVRAGRAMNAGVYFVTQNADDLLDEKMKNNIGLKFAFRSTDLVEIKKTLTFFGVDPEDENNQKRLRELENGQCLISDLYGRVGVMQFHPIFEELLQAFDTRPPIRNEVE

SEQ ID NO: 1574 - protein, 719 aa, Listeria monocytogenes
MRTKEERKARKIEKKQRIKQLPIYKKIIRYVLIAIIFFVILIIMLASVGTVAHAAGLVDETINTSNEYSKYGLGNYQLDFYVNNDWGWLPWNWSDGIGKSVSYGLYAITNFVWTISLYLSNATGYLVQEAYSLDFISKTVDSIGKNIQTIAGVTKNGFSTSGFYVGFLLILIFILGIYVTYTGLIKRETTKAVRAVLNFIVVFILSASFIAYAPDYIGNINDFSKDISTSALDVGTKIVMPDTDSKGKDSVDMIRDSLFSVQVKQPWLLLQYGTTDVDSLGADRVESLLSTSPDTNNGEDREDIVITEIETFNNANLSISKTVSRLGTVFFLFIFNIGISVFVFLLTGMMIFSQVLFIIFAMFLPISFLLSMIPSFDGMGKKAIMKLFNVIMTRAGLTLVITVAFSISTMLYSLAGSSPFFMIMFLQIVTFAGIYFKLGDIMNMFSLQSNDSQSMGRQMFRKPRMFLNRQSRRLQRNVSRAIGKNSRSGKEKEAPTPTKTTKANHERQNENGNESTANRPTSTKQNRSAGTRAGEKMGDLMEAKNRMVDKAGDMKDTIKNAPTNAKYAVHKGKRDLVRNVSEFSQSFADTRNLQQQERATKRNEKKATVAQRRQEMDKAKAEKSNLEPYASMQKRQRDYEERKQPVPRTAPTPAPQASTPKATPERTASTNQQHERPLQKQKNTTKEQVKANKRENTSTTSKNSKTENKITKTTTKRRK

SEQ ID NO: 1575 - protein, 336 aa, Listeria monocytogenes
MKLVKYFAIFGVVFSMFFSLLLFVTIVFAEEDDTRSSREEMIQQGGLNVSAEVLAHRPMVEKYCKEFGIEEYVNYILAIMQVESGGTAEDVMQSSESLGLPPNSLSTEESIKQGCKYFSELLASAESNGCDINTVIQSYNYGGGFINYVASNGKKYSYELAESFSKDKAGGVKVDYPNPIAIPVNGGWRYNYGNQFYVLLVSQYLTPVQFDDETVQAIMNEALKYEGYPYVFGGSSPSTSFDCSGLTQWSYAVAGIQLPRVAQAQYDATQHIPLSEAKAGDLVFFHSTYDAGSYVTHVGIYVGNNQMYHAGDPIGYTNLTDSYWQAHLIGAGRIIK

SEQ ID NO: 1576 - protein, 305 aa, Listeria monocytogenes
MKIKIERKEKPDKPKKQKKIPTIKVGTHKKLTIALWVLLIGSMSFGIYKNFTAIDMHTVHEKEIIEKQVVDTNSIESFVESFSKEYFSWQQSQDSQSNRIERLKNYLTENLQQLNTEMVRSDIPTSSIVNSFQVWSVEQSSDTEYDVLFSVGQQITESENKKNITSTYSVTVYVDEASNMVIIKNPTIDSKPQKASYEPVLSDSDGTVDANTTEEINSFLDTFFKLYPTATEKELSYYVSNQALDVINKDYVFVELVNPVYTQADNQVTAIVTVKYLDKETKVTQLSQFKIILQKNENWIIIKNN

SEQ ID NO: 1577 - protein, 111 aa, Listeria monocytogenes
VNDICEITCFDEEKVQKIQTSLEDKKISDISQIFKALSEETRLTIAYALTLEKELCVCDISIIVKSTVATTSHHLKILSKAGVVQNKKIGKMVYYSLNNSLVETLIKDIVL

SEQ ID NO: 1578 - protein, 87 aa, Listeria monocytogenes
VANERNKVVTTIYGREYTIVGVETTDHLRKVAREVDEKMHEIGSQNHALDSGRLAVLTAVNATHDYLKLEQKYLELEQELARIKGRD

SEQ ID NO: 1579 - protein, 310 aa, Listeria monocytogenes
CLIANTVILVDQPTLEKMKQTYLPFSNPKLPPGAVFAAKKPGVSITGYKSRKVMFQGVNGEAEAKKWVATLPESKAKAPSVSKGILPANFASKNVIGSDEVGTGDFFGPITVCAAYVDAEMMPLLKELGVKDSKAMKDPEICRIAEKIMPLVPHSVLLCPNPKYNELQKRGMNQGQMKALLHNRAIENVLKKLAPIKPEAILIDQFAEKNTYYRYLAKEPSIIREDVFFATKAEGLHLSVAAASIIARYKFVQAFDAMSKEVGIPLPKGAGPHVDAVAAEIIERFGLETLAKYTKQHFANTEKALKMVKK

SEQ ID NO: 1580 - protein, 224 aa, Listeria monocytogenes
MIKLGNDWDELLKNEFNQPYYLTLRQFLKKEYQTKKVFPDMYDIFNALKHTAYKDVKVVILGQDPYHGPGQAHGLSFSVQQGVQIPPSLQNIYLELHNDLNCEIPNNGYLIPWADQGVLLLNTVLTVRAGQANSHRGQGWEILTNHIIEIINQKEEPVVFLLWGSNAKEKLQLLTNPKHTAFTSVHPSPLSASRGFMGCKHFSKTNQFLEQNGVKPIDWQIPSI

SEQ ID NO: 1581 - protein, 1066 aa, Listeria monocytogenes
MKWIMKLRWAILAFWLAAAVVLMFIAPPMADLVREKGELKLPDGYPSSLATEMQKKHNPDDKGSAYIAVYTADHKLTGTELNDIQKSLDSIEKDKDELHVTNVLSSFNQPELKDKFLAKDGKTMVASLTVDDTDASVKSIRNALDKKMDVKGVDTYLTGNKLIQEDVVQGSEDGLHKTEGITVVFILVVLFLVFRSAVAPFIPLITVGISYLVAQSTVAFLIDIFNFPVSTYTQIFMVCIMFGIGTDYCILLMSRFKEEMGAGLNPREAVHATYRTAGKTVIYSGVAVLVAFTSLYFVQFDLYRSAVAVGVGIVVLLAALYTLVPFFMSTLGTHLFWPLNKNISHKENKIWGAAGKFTFARPWIALLIVAAITLPPILLHTGTESFNSLDEISDKYPSKKGFEIVSDSFGAGQVAPTQIFIENDDNMRTTDYIAQIEKISDDLSHLKGIDMVMSASRPAGKRVDDIYIKNQAGQVNDGVGQATDGVGEVKKGLDSASSELKKSEPALDKAVAGVGDLQKGTVATQEGINQLQTALAQIQKGIESGATGAGDLKQGVAEAKSQLATLQNGEAQIQAGYAEIQKNLQNVADQLKGFENPSSQAIDTSKLEEQFKKIGASFQAFAAAHPEVRNDPRFQKLAADIQGLETAGNELKTSAGQQMAALQAKMKELNQGIQQLATAMNQLNEQSKQISDGLSAFSTGLGQIETGLDQLEKGLNQAAVGQGQVVSKMPEVSNALTQIAAGQGALKDGFAGISGQMGQLTDGLTSGADGLGKVESGLNTANGLIDDWSKVPYASSGIYVPDALLKNADFQKVLDQYISSDGKLATINVILTKNPYSNEAMDSIDDINDQLAASMKGTKLENAKIGIGGMTSANYDTRDMSTADYHLVLVIVLASVFVTLVIVLRSLVMPIYLIASLVLTYFAALGFAEIIFMRILGYSGLTWATPFFGFVVLVALGIDYSIFLMSRFNEYNGLSVRDRMIKAMKNMGGVIFSAVIILGGTFAAMMPAGVLSLLEIATVVLIGLVLYAVVILPLFVPVMVKLFGRGNWWPFITRKGDHQENVPPKK

SEQ ID NO: 1582 - protein, 150 aa, Listeria monocytogenes
LERQKVKQLIKSYQQTYIFAMNQIHQAISEISASTVDLSIEQFFVLREIATYDGISATELAATLAVNKSAITPKLKKLVEKGYIRRERNQLDKRAVVLTISEKGNNVYEECEKQLELLVNEWLEILGEKDSEQFFELFQKITKSVVEPRQ

SEQ ID NO: 1583 - protein, 1136 aa, Listeria monocytogenes
VKRSALWKDIYREIWRSKSRFISIFMLIMLGVAFFSGLKATGPDMLLTADNYFNKYELANFNVQSTYGLDETDKEALEDISGVAQVELGYTADTLMKDKNIVTKLFSTSKSDNLNQYKVISGRLPEKSGEIALDNNQLVHKNVKIGDKVTFVKSDGNKLTDTLKKSTYKVVGFVSSPAYIQKSERGSSTVGKGKTDAFGVIPEQDFNLPEYTIANLTFDNLAAKQAFSDEYVSTEEKDKKSVEQALGDQPEKRLNKIKTSEQKKLNEATAEINKGKAELKANEAKLADAKAQLEEGFSKYNAARASYDAKIKQSEAEIANGEAELANAKKQLDAAKIQIDQGEQALIQAEMELEEGRAAWEDANNLLNTANGYLREAKSTLENVLKQPDLTDFELDRASLTDSFQMLASELDLSNADREEYENAMNNLLDDYENGNISDAEIRESINAALAQVANAENEYQSARTALDAEKQTIEQGEKTLAAKNQELQQAKIAYQEGLTKYQDGLEKISLAKQQLAVGKQTGSLELQSALAKLNTGQAEYDKNFALFKKEKAKAEAKLTSAEKDVQIGQQKLDALKVPKYYVLDRNDNPGYSEYKENADRLTSLSTAFPIFFFLIAALVCLTTMTRMVEEQRTQIGTLKAFGYSNGSIILKYLVYGSIASVIGSVLGILIGFQFFPNIIFNAYKSMYEMPSVDIGFYWSYSLLALFVALFCTTFTAYVACRAELRANAATLMRPKAPKIGKRIFLERISFIWKRMNFTSKVTARNLFRYKQRMLMTVLGVAGCTALILTGFGLRNSISDIAKMQYGQIMKYDAAIYQDMSAPPAAKETFDEIMNDSNIKSKLAMSQTNIETVKSGQSAQTTSIIVPKNLNELPNYIVLRDRASHTTEKLTDDGAIITEKLAKLFDVKPGDTITVKNAENDKFQIKVSAITENYAMHYIYMTKAYYQQVFKEKPSYNLDLLMLKDTSEKVESDFAEKLTDSKAILNVTFSNNVSSLLNETLDSLNIVIVVLITSAALLAFVVLYNLTNINVSERIRELSTIKVLGFYPKEVTMYVYRENIILTLMGIAAGFILGFFLHRFIITTAEVDQMMFSPAISWTSYLFSGILTLVFATVVMVVMHIKLKRIDMIEALKSVE

SEQ ID NO: 1584 - protein, 233 aa, Listeria monocytogenes
MTYVEMKDVSKYYQMGENVVTANDKITFGIKKGEFVVIVGPSGAGKSTVLNILGGMDSASEGKIMVDGQDIAQYNAKQLTKYRRTDVGFVFQFYNLVPNLTAKENVELAAQIAPNALDAETVLTQVGLSHRLDNFPAQLSGGEQQRVAIARALAKAPKLLLCDEPTGALDYDTGKSVLKLLQETCRNTGTTVIVITHNTAITPIADRIIEINNAKVRSIKENPEPMSIDDLEW

SEQ ID NO: 1585 - protein, 585 aa, Listeria monocytogenes
MKKTKIVCTIGPASESVDTLVQLIEAGMNVARLNFSHGDFEEHGARIVNIREASKKTGKQVAILLDTKGPEIRTNDMVGGKLEFQTGDVVRVSMTPVEGTKEKFSVTYGELYDDVEIGSSILLDDGLIGLEVIEKDEANRELVTKVLNPGVLKNKKGVNVPNVSINLPGITEKDAADIRFGLEQGIDFIAASFVRRATDVLEITKILEEHNATHVQIIPKIENQEGVDNIDEILQVSQGLMVARGDLGVEIPAEEVPIVQKELIRKCNKLGKPVITATQMLDSMQRNPRPTRAEASDVANAIFDGTDAIMLSGETAAGDYPVEAVKMMAKIAVRTEEVLVAQDKFALKLHENTDMTEAIGQAVGHTAKNLNVQTIVAATQSGHTARMISKYRPKSHIVAVTFNEHVYRGLALSWGVYPRLATPVSNTDEMFDLAVKESLASGVAKQGDLIIITAGVPVTESGTTNVMKIQLIGEKVVKGQGIGSKSVIGKAIVAKSNAEALEKAEEGGILIVKTTDKEILPAFEKSAAVVVEEGGLTSHAAVVGINLGIPVIVGAKDATSLVKDGEIITVDSRQGVVYNGKTATH

SEQ ID NO: 1586 - protein, 125 aa, Listeria monocytogenes
MRKFILYWALYGLIELIMYVWLFQVIGFWPLLFIQIASSAFGVFIFKRLGGNLFRNLRDGRTVAPYLLDSLCFFIAGFLLIIPGVITTILGLLIFIPFSRKLLKPKLTKWLGNQKKHTQYYYFDM

SEQ ID NO: 1587 - protein, 153 aa, Listeria monocytogenes
MFTESMLFLLLFLLLGLIAKNNSLIIAVAVVILLKLFHVDGKVMEIIQAKGINWGVTIITVAILIPIATGQIGFKDLIDSFKSAAGWIGLGAGIAVSILAKKGVGYMAVDPQVTVSLVFGTILAVVLFRGIAAGPVIAAGIAYMAMQLVAFIK

SEQ ID NO: 1588 - protein, 373 aa, Listeria monocytogenes
MTLSKGLENVYVAETSISSIIDDMLTYVGYGIDDLMENNASFEEVIYLLWHLRLPNKDEFKKFKREIQENMAVSETIITSLRMQNHQKLHPMSVLRTTVSMLGVFDTEAELDDGEAVYRKGLRLQAKMPTIVAAFSRIRRGLDPIPPREDLNMAANFLYMITGEEADELSVEAMNKALVLHADHEFNASTFTARVCVATLSDVYSGVTAAIGALKGPLHGGANERVFDMLEEIDQAGDVRNYIQEKIDTKQKIMGFGHRVYRGGDPRAQHLREMSRKLTAEKGEEKWFDISLQVEESVWELKHLKPNVDFYSASVYHALGIDRDLFTLVFSVSRVSGWLAHIFEQYRDNRLIRPRAIYVGPENRSYLPVEERI

SEQ ID NO: 1589 - protein, 420 aa, Listeria monocytogenes
MSQKIQVENGVLKTPNNPVIPFIEGDGTGPDIWAAAKRVLDAAVKKAYNGEKEIAWKEVLAGEKAFKQTGEWLPQATLDTIDEYLIAIKGPLTTPIGGGIRSLNVALRQELDLYVCLRPVRYFKGVPSPVKRPEDTDMVIFRENTEDIYAGIEFKEGSIESKKLIDFLKSEFGVDKIRFPETSGIGIKPISKEGTERLVRSAIEYAIKEGRKSLTLVHKGNIMKFTEGAFKNWGYDLCEREYGDKVFTWNEYDRIKEAEGTEVADAKQNEALAAGKILVKDSIADIFLQQILTRPAEFDVVATMNLNGDYISDALAAQVGGIGIAPGANINYLTGHAIFEATHGTAPKYAGLDKVNPSSVILSGTLLLEHIGWGEAAALINQSMEKTIAAKTVTYDFARLMDGATEVKCSEFADELIKNF

SEQ ID NO: 1590 - protein, 717 aa, Listeria monocytogenes
MTKTLVLAEKPSVGKDIGRVLGAKQGKNGYLEGGKYVVTWALGHLVTLADPERYDSKYKNWNMEDLPMLPEKMKLEPIKQTRKQYETVKKLMNRTDITTIVIATDAGREGELVARWIIDYAKIKKPLKRLWISSVTDKAIREGFEHLKPGKAYENLYHSAVARSEADWVVGINATRALTTKYNAQLSCGRVQTPTLAMIQHREEEIRNFKSREYYGITALTEQESFTWNNGQTFDKALAEKLVKSLQGENAVITDVSMKEKKTFSPGLYDLTELQRDANNRYDFSAKETLNIMQTLYERHKVLTYPRTDSRFISTDIVPTLKERLVACGVGENAKAARQISVKPIKANKSFVDNSKVSDHHAIIPTEQPVSLGDLSDKERKIYDLVVKRFLAVLSDPYIYEETSVKAKIGQEEFTLKGKVVKSLGWKSIYGESREPDQLTKMKKGDTIPVKRINLETGKTKPPARFDEATLLSAMENPSKYMETTNKALAKTLGETGGLGTVATRADIIEKLFNSFSLEKQGKDIQITSKGRQLLELVPEDLKSPELTARWEQKLSKIAKGELDYRKFTAEMRDYAKKAVTEIKQNDKKFRHDNITSQKCPDCGKPMLKVKGKRGTMLVCQDRECGHRESVSRTTNARCPNCHKRMEMRGEGDKQIFVCVCGHREKLSAFQQRRDKQKNKNVSKTDVAKFMKKQNKQEDEPFNNPMAEALAKLKLDK

SEQ ID NO: 1591 - protein, 875 aa, Listeria monocytogenes
VNKLVLIDGNSIANRAFYALPLLNNDKGVYTNAVYGFAMMLMNVLEKEKPSHVLVAFDAGKTTFRHTTFKGYKGGRQKTPSELSEQFPFIRELLTAYDIPQYELANYEADDIIGTLTKKAEADGMEVAIITGDRDLTQLASEKTTVYITKKGIADMETNTPETLKEKYNLTPEQIIDMKGLMGDSSDNIPGIPGVGEKTALKLLHEFGGTVESVLEHAEEISGKKLKEKVLENKELAILSKELATINVDSPIECTVESTKYDGYQTEKVIPLLKEMNFTTLLKNIEGDTPEESKELKELSFEIVTELKEQHFGGKTALYVELENDNYHTANFIGLTVHSSQGTYFFTKETAESSEAFRKWVESDQTKVVYDAKKTIVAMNRIGLAISGITFDIMLASYLLNPSDSIDDFTSVAVRHDYTEVETDEAVYGKGAKRSTPEESIVAAHLARKAVAIADLEKRLVDDLEKNEQLALMEDLELPLTFVLAEMEMQGVSVDTDRLEDMKVELGGRLKTLEASIHSLAGEEFNINSPKQLGVILFEKLELPPVKKTKTGYSTAADVLESLSGKHAIIDEILLYRQLGKIQSTYIEGLLKVTDKETHKVHTRFNQTLTQTGRLSSVDPNLQNIPIRLEEGRKIRQVFVPSKPGWKMFSADYSQVELRVLAHISEDENLIYAFKHDYDIHTKTAMDVFHVEKEEVDSLMRRQAKAVNFGIVYGISDYGLSQNLGITRKEAKDFIDRYFVSYPAVKEYMQDIVRFAKEKGYVETILHRRRYIPEIVSRNFNVRGFAERTAMNTPIQGSAADIIKKAMILMSERLVSEKLEAKLLLQVHDELIFEAPEAEIAKLEEIVPDVMENAVELSVPLKVDSAFGDTWYDAK

SEQ ID NO: 1592 - protein, 273 aa, Listeria monocytogenes
MPEMPEVENVRATLQELVPGKKIDQVIVRVPKMIVSTPPDEFVHMLVGQEIEGVRRRGKFLLFDLTNCTILSHLRMEGKFRLMDENEEVSKHTHIIFHFEDHTELRFLDVRKFGTMEVTNKYGEGETRSIKKLGPEPLTQAFTLTDFATGVKKTSRAIKTALLDQKLVAGVGNIYADEICFEAKVRPERAANSLSDKEIKRIFKATKSIMTEAVALGGSTVRTYVNSQGKLGQYQNKLKVYGKTDEPCVVCGTPIEKIKLNGRGTHFCPNCQK

SEQ ID NO: 1593 - protein, 200 aa, Listeria monocytogenes
MGKTIGLTGSVATGKSTVSSMIQQAGIPLVDADIAARKVVEPGTEGLKEIVAYFGEEILLADGTLNRAKLGKIIFKDKEKREKLNEITHPRVKEYMLEARERFFRAGEELVFFDIPLLFESHLESLVDQIIVVWTTPETELKRLMERNNLTKEEALARINSQIGIDEKAKKADFVINNNESLEKTQKQVYTFIERFVKNK

SEQ ID NO: 1594 - protein, 328 aa, Listeria monocytogenes
MTFFKKLKDKITQQTDSVSGKFKDGLSKTRGNFSGKINEMVARYRKVDEDFFEELEEILIGADVGFETVMELVDTLRREVQLRNISDPKDVQEVIVEKLVEIYQGDEKEDEALHIEEDGLTVILFVGVNGVGKTTSIGKMAHRFKQEGKKVMLAAGDTFRAGAIDQLEVWGERTGVDVIKQAEGSDPAAVMFDAVQAAKARKADILLCDTAGRLQNKVNLMNELEKVKRVITREIPNAPHEVLLVLDATTGQNAFVQAKQFKETTDVTGIILTKLDGTAKGGIVIAIRNELDIPVKFVGLGEQMDDLQAFDANEYVYGLFADMVDNEK

SEQ ID NO: 1595 - protein, 1186 aa, Listeria monocytogenes
MLLKRLEMNGFKSFADKVAIDFVPGMTAVVGPNGSGKSNITEAIRWVLGEQSAKSLRGGRMGDVIFAGSDTRKPINFAEVSLILENEDHFLPLDYSEVAVTRRIYRNGDSEFLINKENCRLKDIVDLFMDSGLGRESFSIISQGKIDEILNSKPEERRSIFEEAAGVLKYKHRKKQAENKLFETEENLNRVQDILYELEGQLEPLEMQASIAKDYLFQQEELEKYEVTLLASEISSLTEKLAEVRKEFGENQTVLIKLREELHAEEAVISREKQALNETDIALDKLQERLLVETEKLEQLEGERNLQLERKKHSSENEQVYAETLAVITEKITALEEQKEVLSSSKLEKETALEIAIKSKKVLEATLAKYDDLSEEAIENRKSDYIDLRHTQTTINNDLGYIERQIGQITSRIDKLDLENSHHVDDRKDMLAQIETTKTHLTKIQSELTEQMEIYREVQQTLAKQEAVFGTQERALYKHYETVQQMKSRKETLEELADDYAGFFQGVREVLKAKKEIPGILGALVELVEIPAKYQQAMETALGASAQNVVVEDDRVAREAISFLKKTKSGRATFLPLSTIQPRELPAATKNALSNQPAFIALASEVISFDEKVSPVILNALGTTILAKDLKGANTLARLVNFRYRIVTLEGDVVNAGGSMTGGATKGGKSSILTRKHELGQLAEKIAELNESTREMESAVQLAKDSMAKKREELEETRVIGENLRLQEKELLGKLDRETENLERFNKQLQLYDIEKADGSEELNKLLERKETLLQEQVEIAKQIEVTDEEIKAMTSSSKALESKRAADLESLSSLKAQIAAKREQLQSATEAVERVTTTLHENYEQKEAAEQKLASLKTNLTSVHTSEETARKSIEELRKDKTETSEKLTQTRQTRAELQEKLELLEAELTQKNNQISFYMEQKNNAEISIGRLEVDIANRIDRLQEAYLLTPEQAEEKILSEVNTEQARSKVRLLKRSIDELGIVNIGAIEEFERIQERFDFLTGQQADLLAAKETLFKVMDEMDEEMKIRFSESFEAIKTEFAIVFPELFGGGSAELVLLDPENLLTTGIDIVVQPPGKKLQNLSLRSGGERALTAIALLFAIIRVRPVPFCILDEVEAALDEANVTRFSRYLKQFESGTQFIVITHRKGTMEEADVLYGVTMQESGVSKLVSVRLEETAELIK

SEQ ID NO: 1596 - protein, 229 aa, Listeria monocytogenes
MNQWEELQESVGFDFKNVELLKQAFTHSSYVNEHRRENVKDNERLEFLGDAVLELTVSDYLFNKYPDMAEGHMTKMRAAIVCEPSLVEFAEAVHFSKYVRLGKGEEKAGGRTRPALLADVFESFIGALYLDNGIDKVVTFLERVIFPKIDAGAYLQTVDYKTQLQEIVQRDRDVLIEYDILGETGPAHNKAFDAQVIVNGQVLGKGSGRTKKQAEQSAAQFAINKLIHR

SEQ ID NO: 1597 - protein, 247 aa, Listeria monocytogenes
MTLQGKVAVVTGGSRGIGRDIAINLAKEGANIFFNYNGSPEAAEETAKLVAEHGVEVEAMKANVAIAEDVDAFFKQAIERFGRVDILVNNAGITRDNLLMRMKEDEWDDVININLKGTFLCTKAVSRTMMKQRAGKIINMASVVGLIGNAGQANYVASKAGVIGLTKTTARELAPRGINVNAVAPGFITTDMTDKLDEKTKEAMLAQIPLGAYGTTEDIANAVLFLASDASKYITGQTLSVDGGMVM

SEQ ID NO: 1598 - protein, 313 aa, Listeria monocytogenes
MTKIAFVFPGQGAQKVGMGQDVAAEYPEAKKIYDDADERLGFSITEIITEGPIELLTKSENAQPALVSTSVAILRALETYGVKADYVAGHSLGEYSALVAGGFLEASDAIYLVRKRGELMEAAVPNGAGAMAAVLGVDRETLKTITEEVTKEGDAVQLANLNCPGQIVISGTTAGVEKAGEKAKESGAKRVLPLAVSGPFHSSLMEPAALAFRDVLAEVKISDGQIPVVNNVDAKETTDKSEISDKLIKQIYSPVLWEDIVEELIKNGVDTFVEIGSGKVLAGLIKKINRDVTVLSAGDAESVKSVAATLKGE

SEQ ID NO: 1599 - protein, 337 aa, Listeria monocytogenes
MKIAVDAMGGDHAPKEIVLGVMKAVAQYKDVEILLFGDETKINEYLTDKTRVKIIHTDEKIESDDEPVRAVKRKKKASMVLAAQAVKDGEADACISAGNTGALMSTGLFVIGRIKGIDRPALAPTLPTVTGKGFVMLDLGANAEAKPEHLLQFGLMGSVYAEKVRKIDRPRVALLNIGTEETKGNDLTKKSFELMKNQDAYEFIGNIEARDLLMDVADVVVTDGFTGNMVLKSIEGTGAAFLSMLKMSLLNGFKNKVAASFLKKDLMALKAKMDYSEYGGACLFGVQAPVVKAHGSSNANGIFTTIRQVREMVEKQVVETIKAEVDKVKVGGTESND

SEQ ID NO: 1600 - protein, 189 aa, Listeria monocytogenes
MKKYSKKDRQMKLQVAIEENPFITDEQLAEKFGVSVQTIRLDRVALSIPELRERIKHVASVNYADAVKSLPIDEVIGEIIDIQLSKSAISIFDVRSEHVFKRNKIARGHHLFAQANSLATAVIPNEIALTTQATVRFVRSVNEGERIIAKAKVRPATDNRAITIVDVKSYVGDEIVLKGKFEMYHATQK

SEQ ID NO: 1601 - protein, 282 aa, Listeria monocytogenes
MDISVYVASAFSKNNIGGNKAGVVLNEPTLTNTQKMAIAKQLGFAETAFLTESNCADYKLEYFTPKEEIDLCGHATIGTFAILMHLNKIHKSQYTIETNSGVLTITIKDGTIFMEQNQPTFYETIPANNLTGCFDLNLLNTHYPIQIVSTGLKDILVPLKSEADLYTLEPNFEEVKKVSKHYEVVGMHLYTFSDDRIICRNFAPLFDINEEAATGTSNGALACYLYQNQYLQKELYVFEQGHSLHSPSEILVKLDVNVHSEIARVYVGGNGYYCETKYLSIE

SEQ ID NO: 1602 - protein, 1475 aa, Listeria monocytogenes
MIHAGLDVGSTTAKAVALNDQGDILFQTYRRHYSDIKKVTLEIMQDMQKKCGMTEMTFKITGSSGLAISKFLNVPFVQEVIACTEAVEQVIPETDVVIELGGEDAKIIYFSGGIEQRMNNACAGGTGAFIDQIATLLQTDPTGLNELAQNANTIYPIASRCGVFAKTDVQPLLNEGARKEDIAASIFQSVVTQTISGLACGRPIRGKVAFLGGPLTFLDQLRYRFTETLKMRDSDIIAPQNAEYFIALGTAFTGLNDIPLKVDDMIHRLSNMDMTTMATDTVILPALFEKQEDLEDFRARHNQMKAKRAKLEDYEGDAYLGIDAGSTTTKLILMSQTNEILYSFYSSNNGNPLQSVIDATSDLYEILPEKVRVAQSGITGYGESLIKAALKIDVGEIETVAHYRAAREFLPDVDFILDIGGQDMKCMKIKKGALDSLMLNEACSAGCGSFLETFAQTLNLSIEEFAARALEAKAPVDLGSRCTVFMNSKVKQVQKEGVSMEDLSAGLAYSVVKNALQKVIKLRSPKDIGEKVIVQGGTFYNESVLRAFELLTGREVVRPDIAGMMGAYGAALIAREHYETGEVTEMLVLEKLREFSAETSQSRCNLCSNTCQLTVTRFGDDRMFVSGNRCERGERVETKRNLLPNLYAYKLKRTFDYKSLKKSEATRGTIGIPRALNVFENYPLWHTILTNLGFRVVLSSKSSKNLYDKGIETIASEAVCFPAKLTHGHIMDLIKKKADRIFYPSVVYEKPEFGEATNNFNCPVVAGYPEVIRVNVDALEEKNIPMISPFLTLDNEKALIEQMSLAFPEVPAADMEKAVQAGLEEAELCRKDIQAEGEAALTYIKKNKIKGIVLAGHPYHIDPEVNHGIPELITMNGMAVLTEDSISHLGEIDHKLRVENQWKYHARLYRAASFTAKSEDLEFVQLTSFGCGLDAITTDMCQEIIEGHNKVYTLLKIDEINNLGAARIRVRSLKAAMEEREKNNVKPGIMAKPKERPLFTKEMKKTYTILAPQLAPTHFEMLEAACRVGGYNLEVLPAVTPRAVDEGLRYVNNDACYPAILTIGQMMDALKNGDYDVNNLAVLMTQTGGGCRATNYISMLKKALGEAGLDHIPVISLNANGLEKQPGFKMTPKVLVRFLAGISLGDALDRMLYRTRPYEVEPGSANKMFRHYLDAGRALMENYSFGAYKKLANEMVRAFDNLPITNEVKPRVGVVGEILVKFHPGANNNIVDVIEDEGGEAVVPDLTDFILYCCYDDHFAANTFGRSKVKSFAKQSVAIPLINQFRKPVTDALKKSERFEAPASIESIAEKASQLLSLGNKMGEGWFLTGEMFELLDSNVPNIACLQPFACLPNHITGRGMIKGLKKMYPEANIMSIDYDAGSSSVNQLNRIKLMLSIARKQLETTEVVTEKETNTRFNPREKILGKAKQVRESAPVEMIGNKVKQARDADPVGAIAQKVKHVATSSEHVQTDND

SEQ ID NO: 1603 - protein, 458 aa, Listeria monocytogenes
MEEQKEELQRGLKNRHIQLIAIGGAIGTGLFLGAGKSIHLAGPSIMLVYLIIGAILFFVMRALGELLIHNPTTGSFTEFAEQFIGPWAGFITGWTYWFCWIVTGIAEITAVGMYVKFWVPDLPQWIPALACVLILLLFNLATVKAFGEIEFWFAIIKVVVIIALIVIGFVLVFIGYKHGTSTASFSNLVDYGGFFPNGIAGFLLAFQMATFSFVGIELVGVTAGEADDPERTLPKAINNIPIRILIFYIGALLVLMSIYPWSNIDPNTSPFVSVFTMIGIPAAAGIINFVVLTAAMSSCNSGIFSTSRMLYTLSAEGKAPKKMHHLSSNGVPATALITSTACLLIGVFLNYFLPEQVFILVTSIATICFIWVWGVILVAHLRFRHKHPEISEKSKFKMPLSPLMNWVSLIFFGGLLVILGFAADTRIALFVTPVWFLILGIAYQILKASNRKTKIRHN

SEQ ID NO: 1604 - protein, 126 aa, Listeria monocytogenes
MTGFKKVILPVLLVVLFLAGCNQAEVPALVLDGTITDTSLLENNNELTVNGTLTWNGEKNDYASEVMITVSSNTAVTNATTGKAMKLADIKEEDTVRAVFPQGSNITSPAPGKVSENATSLKVTPK

SEQ ID NO: 1605 - protein, 381 aa, Listeria monocytogenes
MMKKGILLSILLALVLVISACGESAEEKAAKTPQGKFVQTMKNGMNVPDQYTYTTSFAVNDINVSSTDPSAQTMGILKDIKLSVTTSTDKKANKSEAKFNVTSTNNLLPISMDLDFLVDSKTGNAYIPLKTIVEPDASLLSYLDQATGGMWSKINTDYPDLKNKYLSTEELTSSLTDQPEAKTAVNTKEIEAASKDLNKKAIKLIDTYFTGLEKDRFKEADDGTVSVTIKNADIANLMNQVAKLMDDEKVKADFKVIAESQGSDAVTDFDSTYAEMKSSLTDAAKELKENKTYLISNKLTVKSGKENSLDTLTLQTKIEDKSDASAPESISFTVKTKAEEFVPIEDFPTKDEVISSEELNKIITDITRKMYGDMDISGTNY

SEQ ID NO: 1606 - protein, 153 aa, Listeria monocytogenes
MEFELIMTSERETRLLAKQLGENLTAGDVILLEGDLGAGKTTFTKGLGEGLLIPQMIKSPTFTIIREYKKGRLPLYHMDVYRLEDTSADELGLEEYFYGAGVSVVEWAQFVREDLPEEYLEIKLFHIDENTRKIVVKPVGQRYEQLAMEVFGK

SEQ ID NO: 1607 - protein, 230 aa, Listeria monocytogenes
MILGMDTSSDTMTIALFNEGVVIGEYTTNLRKNHSVRLLPAIAVLMEECGVKPTDLEKIAVAKGPGSYTGLRIGVTVAKTMAWDAGIPIVGISSLALLAENGLYFPGKVVALMDARRGNVYAGVYQVTEGKMQSVIADGHIALTELLEQFAPSEELILFVGTLTEQICVTVTEVLGERAVFAQADYTYSRASSLVKLAENLDGEPADNFVPDYLKLAEAESKWLESRGSE

SEQ ID NO: 1608 - protein, 590 aa, Listeria monocytogenes
MIEQARAILQQNFGYQDFRNGQVDVISKLCAGEDTLAIMPTGGGKSLCYQIPALLFDGLTIVVSPLISLMKDQVDALVSEGIAATFINSTLTNREIDIRLDAAFSGELKMLYIAPERIETPGFQRLIEQVPISLFAIDEAHCISQWGHDFRPSYLTLCDSLDKMTRRPLVIALTATATQAVSDDICRLLKIRADSVVKTGFSRDNLAFQVVKGQDKDKYLIDYLTKNVTESGIIYASTRKEVERLHSFLQKKGVESGMYHGGMTDLARKDWQEKFLYDDIRVIVATNAFGMGINKSNVRFVIHYNIPRNIEAYYQEAGRAGRDGVPSDCILLFSPQDSRIQQFLIEQSEMDDERKQNEFAKLRQMTGYGYTEICLQKYIVQYFGDDEPNCGKCSNCLDTREATDITILAQQVFSCIKRMGERFGKVLIAKVLTGSADQKVKDWRFDELSTYGLMKDASQKDVLQLIDYLTAEKYLQPTDSQFPSLKLTDRAVSVLRGELKVERKQAKRAEKVKIDVNSDLFEKLREVRRELAAKHKVPPYIIFSDETLREMCAYMPQTEDALLEVKGIGAMKRDKYGAEFLAVLQQEASK

SEQ ID NO: 1609 - protein, 151 aa, Listeria monocytogenes
VSLEEALLFREATVTDLKSIMNVENAAFTVPWTEAAFRNEFIINQYAYYLLAIYKEQVVGYAGVWLVLDEGHITNIAIHPDYQGNHYGEALLREMIRVAKERGVVRMTLEVRVSNDVAQGLYKKLGFQDGAIRKNYYPDTKEDALVMWVDL

SEQ ID NO: 1610 - protein, 340 aa, Listeria monocytogenes
MKKNTLILGIESSCDETAASVVKNGNEIISSVVASQIESHKRFGGVVPEIASRHHVEQITLVIEEALKQANVTMDDLDGVAVTEGPGLVGALLIGVNAAKTLAFMHNLPLVGVHHIAGHIYANRFETEFKFPLLSLVVSGGHTELVLMKADNEFEIIGETRDDAAGEAYDKVARTLGLAYPGGVQIDKLAKDGEDTFHFPRAMMDEGSFDFSFSGLKSSFINTLHNLRQRGEEPNPNDMAASFQASVVDVLVSKTIRAAKQYDVKQLLLAGGVAANQGLRERLIQEVKLELPETELIIPPLALCGDNAAMIAAAGTVSFLQGKRSGFDMNANPGLLLEDI

SEQ ID NO: 1611 - protein, 319 aa, Listeria monocytogenes
MKKILIISSSIIVGLLVIITICASFYLYSYALARDNSSMNDTATTDETTDTAKLAKKNREANVAWMEKQNLIKWTETSADNLKLVANYLPADIPSNTTIILAHGYRGKSGKVEMAGLARMYHEKFGYNVLMPDARAHGESEGDNIGFGWPERKDYVQWIDQVIDKNGTDTQIALHGVSMGSSTVLMTSGEKLPKQVKSIIADCGYTSMDAELSYQLKAMFHLPKFPIIPTASLINKFKEGFFFSEASAVDAVAKTDLPIFYIHGDADAFVPTYMVDELYDATNSYKEKWIVKGAEHGQAFTVDPKTYEEKVRQFLNKTM

SEQ ID NO: 1612 - protein, 650 aa, Listeria monocytogenes
MILLQVQQISKFFGAEVILDNIKLEVKTGDRIALVGRNGAGKSTLLKIIAGKMSYDGGTISKPKSVEIGYLAQNTGLESSKTIWDEMLSVFDSLRKMEADLRKMELRLGEPELYNDPEKYQALMTDYDTLQHTFKESGGYTYEAEIRSVLNGLRFYPEDYEVEIASLSGGQKTRLALAKLLLAKQDILVLDEPTNHLDIETLAWLETYLQNYHGSLLIVSHDRYFLDKVVNQVYEISRTKIDYYKGNYSSFVNQKQAKLEQMWKEFDKQQKQIAKLEDFVARNIVRASTTKRAQSRRKQLEKMDVLGRPQGDEKAAHFGFQFEKQTGKDVLMVDQLSIGYAKDKRIASNLTFEMKRQDSLALVGPNGIGKSTLLKTLIRDIPALSGEFHFGAGVKIGYYDQEQAKLTSNKTVLMELWDDYPELNEVNVRTTLGNFLFSDDDVLKNVQSLSGGEKARLALAKLTLLEANVLILDEPTNHLDIESKEVLEAALIDFEGTILFVSHDRYFINRIASKIVELAPEKATVFLGDYDYYQEKLAEEKELARLDAEDRRKKGEQVEATASVRKLNYQEEKEQQKLLRQRKRKLEEIEKSMEETDEKIAELELQLTNPEVFQDHEKALEITQELDAVKADGEKLMEEWEQISEELESI

SEQ ID NO: 1613 - protein, 215 aa, Listeria monocytogenes
MMEETTKIPQATAKRLPLYHRYLKYLDESGKERVSSAELSEAVKVDSATIRRDFSYFGALGKKGYGYNVSYILDFFSKTLSQDKQTNVALIGVGNLGTALLHYNFMKNNNIKIVAAFDVDPAKVGSVQQDIPIYHLNDMEEIVRENGVEVVILTVPADEAQVTVDRLIEADVKGILNFTPARISVPKQVRVHHIDLTTELQTLIYFLENYPAKTE

SEQ ID NO: 1614 - protein, 228 aa, Listeria monocytogenes
LAKRYITIVLVYLLLLFSASAGIPIIQHVLLSTTSLSIEDAASYGMVIWSIFSNLLSLAIIIPMLYRKPKENKIELGEKTKPLLSIVWIVGGVIGLYAAQIVCSIIITLISGDLSNSANTELLVDLTKAAPIFLIFISILGPILEELVFRKVVFGGLSNVMNIHVAAVISSLFFGLLHGDISFLLTYFVIGLILCFLYTKTKRIVVSMGAHILMNTIVLLLSLGIIGG

SEQ ID NO: 1615 - protein, 302 aa, Listeria monocytogenes
MEIIATADSMKQAEQLLRAGVDRLYIGNSQFGLRLPYSFSVEELREIVHLAHQEGKKVTVAVNSLMHNEHMEKLPGFLEQLADMEVDAVTCGDPGAIMLLSEMAQPIPFIYDAQTFVTSAEQISFWEKQGAIGAVLARELTEGEIKTIAHSLTIPVEVLVYGPTCIHQSKRKLVTNYERIVEMEDDTSKERGLYLREPNDETSQLPIYEDESGTHIFASEDVSLVPYLADLYEAGLKTWKLDGVLAESENFVQIASLLVEAKEATLKGQFVAEYFVNKLTELQPQTRKLDAGFYLKNPDDVK

SEQ ID NO: 1616 - protein, 408 aa, Listeria monocytogenes
MSKILKKPEVLAPAGNLEKLKIAIRYGADAVYIGGQAFGLRSRAGNFSFEEMKEGIAFAHERNAKVYVAANMVAHAGDTEGAGEFFLTLRDIGIDAVIVSDPALISICFQDAPGLPVHLSTQASATNYKTLEFWKKQGLERVVLAREVSMQEIQEIGEKTDVEMEAFIHGAMCISYSGRCTLSNHMANRDANRGGCAQSCRWKYDLFEIDNGVSKNLVDTDEEPFSMSAVDLSMIKYIPDMVDAGVDSLKIEGRMKSIHYVSTVASVYRRAVDAYCADPENYVFDPAWEEELWKVAQRELSTGFFYKEPTEDEQLFGKTRKIPQYAFAAQVLEYDEKTKIATLQQRNNFGVGEEIEFYGPGDTGFKQVVEVLWNEDGVEIDRAPNAMMTIKMPVDKPVKPFYFMRKKK

SEQ ID NO: 1617 - protein, 185 aa, Listeria monocytogenes
MIGWIIAIAVVVILVLIYFGLYNSLVKYRNRVDETWAQIDVQLKRRFDLIPNLVETVKGYAKHEKETLTKVIEARNKMMEVPADNRQGQIEADNMLSGALKSIFALGEAYPDLKANTSFIELQHELTTTENKVAYSRQLYNTTVMTYNTKVQSVPTNIVAKLHNFTERDMLSIPEVERVAPKVEF

SEQ ID NO: 1618 - protein, 304 aa, Listeria monocytogenes
MLFEQIAANKRKTIFIILGFFIFVLMVGAAIGIIVWNNYLNGLVLAAVIGAFYILIMVMSSSSVVMAMNHAKEVTSKEQAPVLWDTVESMAMVAGIPMPKVYIVEDPSPNAFATGISPEKGAVAVTRGLLNKLERYELEGVIAHEISHIRNYDIRLSTIAIALVAVIAILSDIAMRMIFWGSLTGGRNNRKSDNNNSGGAQAIIYIVALIFVILAPIIATAIQFALSRNREYLADASAVELTRNPDGLIQALQKISGDSKKMEEVSASSESIYFSSPLKSKKNKPGLFDSHPPISSRIERLENM

SEQ ID NO: 1619 - protein, 272 aa, Listeria monocytogenes
MINQNLYYQSVANSKPIEIYLFFDPACDDCWNIEANMLRLQMEYGNYFKLRYVLHNNLQTFVCKQKRAGNSNLSLKEQQIGAHLSYISCLAVKAAELQGKKQGITFLRKIQAAYFLENKDIASDEVLYDIAVSTGLDLSEFKKDLASTVAKRAYIGDQKVAQEMEIHENPTVVFFNKNIEDAGLKLSGLHRYEVYVHVLSELLNDAPQPEERPQMEEYLAKVKVTSSASMADFYGVSEQQIERQMKKWRLQQKVELIDAPAGQSHWKYIGNL

SEQ ID NO: 1620 - protein, 194 aa, Listeria monocytogenes
MVKELEIEFRNLLTKEEYDTLIENFRVKEDDFFEQTNYYLDTTNFGLKERHSALRIRQLETQYQLTLKTPEARGLMETTQILGEDQASAIISGANIPVGPVRDTLKELGINHEDLQVFGSLKTIRAEKDYKKGLLVFDKNFYGSISDFDLEYEVSDYDKGKEVFDKLLKEYQITNQPAENKVARFYHHVYENNK

SEQ ID NO: 1621 - protein, 155 aa, Listeria monocytogenes
MILTLLQNGDYETARTQALTELKNNSDNAELHYYAAWAHDALGKEDAAIPFYEKALQLGLPADSRKEAYIGLGSTYRITGQPEKSIRLFETALQEFPDNNALRTFSVMAKYNQGLEKEALEEALMLLTQTTSDEDILSYKKAIQFYAQDLDATFH

SEQ ID NO: 1622 - protein, 222 aa, Listeria monocytogenes
LNHWEDFLAPYKQAVEELKIKLKGMRSQFELENNHSPIEFVTGRVKPVASILDKANQKHIALDHLVEEMQDIAGLRMMCQFVDDIEVVVRLLRQRNDFRIVEERDYITNKKPSGYRSYHVVIEYPVETIQGEKKILAEIQIRTLAMNFWATIEHSVNYKYQGEFPEAINKRLKRAAEAAFQLDEEMSQIREEIQEAQVYFSQNKDVSKDKKAVHQVMPKKNK

SEQ ID NO: 1623 - protein, 264 aa, Listeria monocytogenes
MKYMITSKGDEKSDLLRLNMIAGFGEYDMEYDDVEPEIVISIGGDGTFLSAFHQYEERLDEIAFIGIHTGHLGFYADWRPAEADKLVKLLAKGEYQKVSYPLLKTTVKYGIGKKEATYLALNESTVKSSGGPFVVDVVINDIHFERFRGDGLCMSTPSGTTAYNKSLGGALMHPSIEAMQLTEMASINNRVYRTIGSPLVFPKHHVVSLQPVNDKDFQISVDHLSILHRDVQEIRYEVSAKKIHFARFRSFPFWRRVHDSFIED

SEQ ID NO: 1624 - protein, 296 aa, Listeria monocytogenes
VFLEWKVETEEDGLLLRTFLKSKHISKQLLTAVKFGADGKIEVNNEEQNVLYHVKVGDKVRLTFPTEQQNERLLAEYTNLDIVFEDDFLLIINKPAGMASIPSQYHPNGSVANFVKGHYEAQGLTNAIHIVTRLDRETSGLMLIAKNRFAHARLSTFLQKGLLKRRYQAFISGVLVEQKGSIEAPIGRKEVSIMERFVTPEGKYAKTNYEVLARYRAFDHVAIQLETGRTHQIRVHFSYIGHPLIGDDMYGGDTNLLKRQALHSCHLHLVHPLTEEYMAFDLPLPADMEEIIQKSK

SEQ ID NO: 1625 - protein, 488 aa, Listeria monocytogenes
MWETKFAKEGLTFDDVLLVPAKSDVLPNDVDLSVEMAPSLKLNVPIWSAGMDTITEAKMAIAIARQGGIGVVHKNMSIEQQAEEIEKVKRSESGVIIDPFYLTPDHQVFAAEHLMGKYRISGVPIVNNEKERKLVGILTNRDLRFISDYSTVIKDVMTKENLVTAPVGTTLKQAEQILQKHRIEKLPLVDEAGILKGLITIKDIEKVIEFPNSAKDKHGRLLAAAAVGITNDTFVRVEKLIEAGVDAIVIDTAHGHSAGVINKISEIRQTFKDVVIVAGNVATAEGARALFEVGVDIVKVGIGPGSICTTRVVAGVGVPQITAIYDCATVAREFGKTIIADGGIKYSGDIVKALAAGGNAVMLGSMLAGTDESPGETEIFQGRQFKTYRGMGSLAAMEHGSKDRYFQADAKKLVPEGIEGRVPYKGSVADIIFQLVGGIRSGMGYTGSPDLRHLREEAAFVRMTGAGLRESHPHDIQITKEAPNYSIS

SEQ ID NO: 1626 - protein, 262 aa, Listeria monocytogenes
MNLSLEGKTYVVMGVANKRSIAWAIARSLNEAGAKLVFTYADDRAKKSITELVPSLSEVNQNPLILACDVTSEEAITETFETIKDKAGKLSGLAHCIAFANKDFLTGDYLEVDRKSFLQAHEISAYSFTAVARALKHLEMLTEDASLLTLTYLGGERVVENYNIMGVAKASLDASVRYLAMDLGAIGVRVNAISAGPIRTVSARGVSGFSDSISLVEERAPLKRATQAEEVGDTAYYLFSNLSRGVTGEVIHVDSGYHIIGF

SEQ ID NO: 1627 - protein, 424 aa, Listeria monocytogenes
MKKKLWMTFGPLLVAFAVFLFVLFGPSSLFSKVSSDTVEKSATSMNESVIQGLDIQKKALQEGNYLPIYGSSELSRVDPFHPSVVSKKYNQGYTPFLLGRPGTQSLSHFLDVNALGDDLKGKKVAVVLSPQWFQPKGVSDPSFGANFSPLHAYKFALEDTKNTPERRYAAKRLLSFQVVQSDSTLKKLLENIVAKGPKKPHDPKLLNITGNVELKILERKDDLESKYIIGSKQDRVSKGLKELPETLDYQQLDELAKETGERSTGNNPFQVKEHYYQKKIKPIEGKLKNSRKDLRYDQSPEFADLQLLMDAFKKAGADVIFINPPINGKWIDYIGMDKQGLDDYYAKTKEQIESQGFRYYSLEEYQNDAFFLEDPIHLSWRGWVKIDQVLADFVKEPIQTNYKPTPKEYYFKEHPENGPKKDRK

SEQ ID NO: 1628 - protein, 394 aa, Listeria monocytogenes
VSLPYGTILYFGVLVLFLIPIIVAGLLGKRLPIYNAFVTLVFLYFMFSASPVQGATFIFFVFWQLALVRLYFHYRQEKKRNHGGVFVIAVILSILPLVISKVVPILGDHVTMVGFLGISYLTFKATQMIIEIRDNLIKQYNAWDFVNFLLFFPTISSGPIDRFRRFKKDVDNPPSKEAYLALLNRGIFLIFLGFLYKFIIAYLVNKHFVVPLDIAITHNVDTTKSLIGYMYAYSMYLFFDFAGYSAFAVGVSYLLGVQTPMNFNKPFAARNIKEFWNRWHMTLSFWFRDYVFMRFVFWVTKKKWFKSKFTIAYLAYFVNFFIMGVWHGLHWYYIVYGLYQATLIVGFDLFERFNKKHKFYPKNKITYVIGVIITFQFVCFGFLIFSGILDKINF

SEQ ID NO: 1629 - protein, 510 aa, Listeria monocytogenes
MTTSIIERIDAWAEKTPDFPCYEYAGTRLSYKELKRQSDAFGSFLLKNLITDKEKPIIVYGHMSPLMLVAFLGSIKSGRAYVPVDVSMPVERIEQIKKAADPSMFICTEELPNNLTITGCPVLTQDQLMDALEKHFGEVPDKEACVNNDDNYYIIYTSGSTGNPKGVQISQNNLVSFSNWILQDFSLSQGLRFLNQAPFSFDLSVMDLYPSLLSGGTLVPLDKTITANMKDLYREIPAQNLDVWVSTPSFADLCLLDENFNQENNPRLTRFLFCGEVLAKKTASELLDRFPDAVIYNTYGPTEATVAVTQVKVTREIIDAYPSLPLGVIKPDMRLHIVDQETGEVLPEGEKGEIVLIGASVSKGYLNEPEKTDQVFFDYKGYQAYRTGDSGIIKDGYLFFQGRLDFQIKLHGYRIELEDIENNLKKVSYIQNCAIIPKMKDEKVDMLVAQVIPTTHDFEKEYQLSAAIKKELKEFMPAYMIPRKWIYKTDFPLTMNGKIDRKSLNSEVNK

SEQ ID NO: 1630 - protein, 179 aa, Listeria monocytogenes
MEDKRLIREKILRNLNSIDKVEHRERSIKLAEKLFLLPEWENAKVVGITLARHPEIETEAIILQAKKEGKTILIPKTYYPSRKMEFKKMDSIHPLIKSKFGILEPNELAETVDKKVIDLLIVPGVAFNKDHYRIGFGGGFYDRFLTDFQGHTVSLYLYEQQIEFTPETHDEPVSILIGG

SEQ ID NO: 1631 - protein, 512 aa, Listeria monocytogenes
LSFQEQYVFWRLTNYFLGVEKYRLIHLHEEKQELWLENTSQKKRPVIRIQMKELSWANVVERDVTHTLHVTENLRKQMGRLKLPLVNIYITPFEPMGDISPFFGQSIASPNEKVKLENILLANEQMREHLDILIKTLELPEEAFVLPNEITKELVAKEREQVIAYITTKVNEEQKVARNSKPIVTYTFIGLLVAAFLWLSFQGGTTNSFNLIKWGGKFNPLIYAGEWWRFISPIFLHSGLMHIASNAVMLYIVGAWAERIYGKWRYVLILLLGGICGNIASFALNMNLSVGASTAVFAVMGALLYLVVLKPNLYAKTIGVSIASLVAINLLIDVFSSQIDIAGHIGGLVGGFLLAGALSLPKQFFHWRRLAYGISLFAVAVLFLYFGYQKGEQPYDPMQANVAVQQYLQEQNKKEATKITDNLISSGSADGYSYTYAASIALQDKQIDKAETMAKEAINIDKDIPEAHYYLSVCYRIKGDMPNAIKEANSARELSSNPFFDSYYDELEKIKE

SEQ ID NO: 1632 - protein, 322 aa, Listeria monocytogenes
MNKKLIGVDLGGTTAKLAILTKEGDIEEKWTIDTNIEDKGAHIVKNIGDSINQKLTDLQLDNDIFYGIGMGTPGTVNYETGTVKGAYNLGWADEQNVSQDLENITGLKIILDNDANVAALGERWKGAGEGGANVVFVTLGTGVGGGIFAEGKILHGIRGAAGEIGHVTVVPENGYDCTCGKKGCLETVASATGIVRVAKDLAKEFTGKSALKDAIDNNETITSKLIFELGAEDDALANETIDKISFYLALALSHIGNMLNPEKIIIGGGVSAAGDQLLTPVKTYFETMVFPAVKESTKLSIATKGNDAGIIGAAWLALPSED

SEQ ID NO: 1633 - protein, 363 aa, Listeria monocytogenes
MKKSNTFLLITILVGLVFISFGCSEEKETPKKTAKEVQGVQIKTKEFQRVVGWLSKDSVLLQTKKSGVTYFEELNIYNEKKRPIFNTKESISEVQISPDYRNILLYSAESAEKATMRIIALNDGSTVASRATKPLTTTFYWNDESPEKIMFVTYSPEWNFQIENWDYTLDQLDKIDVASPFISWYGDNLVISNNKDKPDDELGNLYLQDIRDSATKNLIVANIMQFAVHDNVLLTIEKNSDEKLLYDFRTLGFQNFFSYNAAREYDELGTFVPYFDTNFDKNTFLTFVPYKSAKIGSGAKEYKLVKIDPTNKKESTILELMDNQPILSYETGDLVLYGYLFDKVIDTKTGKMYNLINTPTKSF

SEQ ID NO: 1634 - protein, 105 aa, Listeria monocytogenes
MKTNAFTLPFTIFIALISILIVTGSASIFKTQIQYEKMIQNYYLASTKLNLAFIEIKETSSLSYQFKTNYKGTKIDCQATDNQLTEFNCQITLENGYTLTKTTSP

SEQ ID NO: 1635 - protein, 155 aa, Listeria monocytogenes
VQQINWKKNVSFRSGSPAFTLLETILSITIILSISLLIPLFFQCYNKTIQLSNIDQTTEWQLFLIQTRLELEKATNIQIDGNKLSFSNGKDLITYSKYNDLVRRQVNGKGHEPLLTNVKDYQLIKKEKQLHLTVQDSNTQIYTSVFALPEVVSNP

SEQ ID NO: 1636 - protein, 94 aa, Listeria monocytogenes
LNKINGFSLVESMVSLLLFAMVCSFLLPTAMTIFEKLDHQKETSRVYQEIYEHSELLRHKNVPVNFKDERIQSFHYQGGIQICATNKLEEKCIF

SEQ ID NO: 1637 - protein, 142 aa, Listeria monocytogenes
MKINGFTLLEMLLVLTISFTLITLTIFPISSTLSTLREKQLLEEIKASIYYAQINAVATNQDTFISFDPTKNQLITYTNSKTLVIIPFSQTLTLTQPKIRNFRFSSTDGSINRFSTIHLTSSTNNYKLIFQIGKGRFRIEQN

SEQ ID NO: 1638 - protein, 107 aa, Listeria monocytogenes
MFKKKIDWRDERGFTLVEMLIVLLVVSVLLLLTIPNIVSQSKSINDKGCEAFISMVQGQVQSYQLDKNSIPSVADLVSGGYLKANQKSCPNGNSIKIDSSGNVSEKK

SEQ ID NO: 1639 - protein, 343 aa, Listeria monocytogenes
MAFFQRTNWKDDGEFLIRVASLLEKGFSLDATISYLSITSPKYCKRYERIITSLANGNSFSYALSKNGFPDFICSQLHYASSHGYFLQTIHETGVHMKRKAEEKNALMKTFQYPLVLFSTVILVFFLLRIFLLPKFELLFTQLSTNGTVGTNFTYFLLEKVPILLGIFLLSLFLIFSFIIRKQKQKNAYDRAYFYCRIPYIRQFSRIHYSQYLSRELGYLLKSGLSITHIMHLFAQEESPAFFQEIARQILPTLEQGLSLTKALEKMPIFEKELYYIAIHGEKNGNLAEEFLFYYNLCHQKSLQKTEKLFSFIQPIVFIVIGILIVSIYLSILYPMFSMVNQI

SEQ ID NO: 1640 - protein, 340 aa, Listeria monocytogenes
MPQKMTEHIITQALRINASDVHIHPLSNRYLLRLRVNGTLIPLLYLPIDVGEKLISFLKFQAALDISEKRRPQSGSFEKNTNTEKIALRLSTMPSKDFHESMVIRIFRYKHPIPFLNSSVFPRSTKQIQQQCKNQTGLFLFSGSTGSGKSSSMYSLASSIENKDELQIITIEDPVEHYSPGFLQIEVNEKASITYAPIIRSVLRHDPDILIIGEIRDAETAKIVIRAALTGHLVLSTVHAGDAYGVLLRLLEFGISSEELAQCLLGISFQKLTLLVCAFCGEKCHPLCTHLRRKRTAIYEVLTKQDIKAYFQSNQQQIEPKYPIKRTFEKGVSYGFFSAY

SEQ ID NO: 1641 - protein, 362 aa, Listeria monocytogenes
MTELLKTPIHPLYAKYGAKTIDFGGWDLPVQFAGIKAEHEAVRTDAGLFDVSHMGEILVKGPDSTSYLQYLLSNDIEKIKIGKAQYNIMCYETGGTVDDLVVYKKSETEYILVVNAANTDKDFEWMVKNIRGDVSVTNVSSEYGQLALQGPNAEKILSKLTDVDLSSISFFGFVEDADVAGVKTIISRSGYTGEDGFEIYMPSADAGKVFEAILAEGVAPIGLGARDTLRLEAVLALYGQELSKDITPLEAGLNFAVKLKKEADFIGKEALIKQKEAGLNRKLVGIELIERGIPRHDYPVFLNEEQIGVVTSGTQSPTLGINIGLALIDTAYTELGQEVEVGIRNKKVKAKIVPTPFYKRAK

SEQ ID NO: 1642 - protein, 448 aa, Listeria monocytogenes
MAKHRYLPMTEQDEKEMLDVIGVKSIDDLFQDIPEKIRFKRDYDLKPAKSEPALLRELSKLASKNANTSEYASFLGAGVYSHYIPTVVDHVISRSEFYTAYTPYQPEISQGELQAIFEFQTMIAELTGMDLANSSMYDGGTALAEAAMLASGHTKRKKILISGAVHPESSNVLKTYATGQHIEVEVIPELDGKTDIEALKKALSDDIAGFVAQYPNFYGQVEPLAELEKLVHENNSLLLVSSNPLSLGLLTPPGEFGADIVVGDSQVFGIPESFGGPHCGFFAVTNKLMRKVPGRLVGETVDENGKRGYVLTLQAREQHIRRDKATSNICSNQALNALASSVAMATLGKTGLVEMAKQNLDKSHYAKQKFREKGFEVLFSDGFFNEFVVKLSKPIKEVNKSLLDEGIIGGYDLGFYEEKYKHHMLVAVTEMRTKEEIDAFVASLEGAK

SEQ ID NO: 1643 - protein, 488 aa, Listeria monocytogenes
MNLEETMPLVFERSIPGRIGFSLPESDVPETNAGDYFDQAYIRSIPADLPELSELEIMRHYTNLSNHNFGVDSGFYPLGSCTMKYNPKINEKVARFPGFANIHPNQPESSVQGALELLYDLQTSLVEITGMDEVTLQPAAGAHGEWTGLMLIRAFHEKNGDTKRTKVIIPDSAHGTNPASAAVAGFDVVTVKSNEKGLVDVADLKKVVGEDTAALMLTNPNTLGLFEKDIVEMAEIVHEAGGKLYYDGANLNAIMAKVRPGDMGFDVVHLNLHKTFTGPHGGGGPGSGPIGVKKELIPFLPTPVLTKKEDIYTFDYNYPDSIGRVKPYYGNFGINVRAYTYIRTMGPDGLKLVTEYAVLNANYMMRKLQEAYDLPFDQVCKHEFVLSGNRQKKLGVRTVDIAKRLLDHNFHPPTVYFPLIVGEAIMIEPTETESKETLDSFIDTMLKIAKEAEENPEIVQEAPHSTYVKRLDETRAARKPILRYQKEV

SEQ ID NO: 1644 - protein, 126 aa, Listeria monocytogenes
VISWIIAIIILVILLGYEIYQFVMRRKAVKVLTEEEFKKGYRKAQLIDVREPNEFDAGHILGARNIPVTQMKNRTTEIRQDLPVYLYCQTAQRSNRAAIMLYKRGYKQVYQLKGGYRKWTGKTKSK

SEQ ID NO: 1645 - protein, 90 aa, Listeria monocytogenes
LKKYPLIAIVLLALVGIGLLMGGFKSFFILIVSVLIGTLIFTLLLRLFTNRKTDSNYQKAVKQSKNMHNPKKKTKKKRKSSFKVIDGGKK

SEQ ID NO: 1646 - protein, 321 aa, Listeria monocytogenes
LSKQNVPSYGGQAVVEGVMFGGRKQTVTAIRRIDGSLEYFYLEKNSPVWVMRMKKIPFLRGIVALIESSAIGSKHLAFATDRYDEDPNNPVEEEKIEKKESKVAMWLGVAVIGILSFVFAKFVMTLIPVFLAELFRPIVPGDTAQVFLESLFKLILLLTYIFAVSQTPIIKRVFQYHGSEHKVINCYEENLPLTVENVQKQSRLHYRCGSSFILFTVIVGMFIYLLVPTDPLWLRVVDRILLIPVVLGVAFEVLQLTNKCRNIPVLKYLGVPGLWLQLLTTKEPSDDQVEVAIASFNELLRVEKEGAPIDVVEPDNLELLE

SEQ ID NO: 1647 - protein, 181 aa, Listeria monocytogenes
VKSIAVTGYKNFELGIFKKDADEAVYIKETIKRHLLPLVEDGLEWVIISGQLGIELWAGDVVAELKADYPIKLAILEPFEKQSANWNEANQLWASEVLEKADYHAFITKRPYESPAQFAARDGFIIDNTDGALLVYDLEKEGSPKFFYDRATQAKEQSNYYIDCIDFYALQEVVEDMNQTF

SEQ ID NO: 1648 - protein, 113 aa, Listeria monocytogenes
MTSEQFEYHLTGKEILEKEFKTGLRGYSPEDVDEFLDMVIKDYSTFTQEIEALQAENIRLVQELDNAPLRTSTQPAPTFQAAAQPAGTTNFDILKRLSNLEKHVFGNKLDDNE

SEQ ID NO: 1649 - protein, 382 aa, Listeria monocytogenes
MKTFQLVATAASGLEAIVGKEVARLGYDPKVENGKVYFEGDLSAIARANLWLRVADRVKIVVGVFKATTFDELFEKTKALPWEDYLPLDAQFPVAGKSVKSTLYSVPDCQAIVKKAIVNRVSEKYRRSGRLMETGALFKLEVSILKDEVTLTIDTSGAGLHKRGYRLAQGSAPIKETMAAALVLLTSWHPDRPFYDPVCGSGTIPIEAALIGQNIAPGFNREFVSETWDWMPKQIWADARQEAEDLANYDQPLNIIGGDIDARLIEIAKQNAVEAGLGDLITFRQLQVADFQTEDEYGVVVANPPYGERLEDEEAVRQLYREMGIVYKRMPTWSVYVLTSYELFEEVYGKKATKKRKLYNGYLRTDLYQYWGPRKPRPKKED

SEQ ID NO: 1650 - protein, 242 aa, Listeria monocytogenes
MTKIWIDAGHGGKDSGASGNGLVEKNWVLTVAKQLQTELVKAGFEVGMTRTNDTFYELSDRAKKANSFKADLFISLHFNAGGGKGYEDYIYTSVPAATVEIQKIIHKNIITKVTKHGMNDRGMKKANFAVLRETAMDAILLEAGFCDSTDALILEKKAYQTDYCLGIVSAVQEIFGAMVTKYRAGKYLTSDDAISGTNIKGYLEAGTKVFVYKETEKTLNLTTTKGVPGSWVLKTEVNTGKR

SEQ ID NO: 1651 - protein, 502 aa, Listeria monocytogenes
LVETLEEEFLAYIKKMEALEEALALVYWDLRTGAPAKGMEGRSDVIGVLSEEIFNMQTSEEMAAFIAGLNQDKENLSEITRKTLEESQKTYDLNKKIPSKEYAEYTKLVAQAETAWTTAREQNDFAAFEPFLTKILEMKRKFVEYWGYEENKYDTLLDQYEPGVTVSVLDSVFEKVRDGIMAIREKIENEGVKPDATILNTKISEAKQKEFSIRILNKMGFDFEAGRLDETVHPFATGLNTGDVRITTRYNENDFKMAVFGTIHEGGHAIYEQNFDAALVGTPLANGASMGIHESQSLFYEIIIGSSLAFWKSNYADFQAITKPAFDQVKLEDFYRAVNISESSLIRIEADTLTYPLHIMIRYELEKALINGELEVKDLPKAWGDKYEEYLGIRPDNDTNGVLQDIHWAGGDFGYFPSYALGLMYAAQFFNQMQKEIPNIDAIIASDDYSELKIWLTEHVHKFGKTKKPLEILTDTTGEGLNPTYLLDLLEKRYAYVYQFNK

SEQ ID NO: 1652 - protein, 192 aa, Listeria monocytogenes
LKLLEEFIQEKGTVLPGNVLKVDAFLNHQIDPVLMQAMGNEFAKRFQDLGITKIVTIESSGIAPAVFAGLALSVPVVFARKKKSVTLTDNLFTSTVYSYTKKESNDISVSKQFLTADDTILVIDDFLANGQAALGLLEIAEHAGAKVAGIGIVIEKSFQQGRELLNKTGIPVYSLARIASLENEEILFLEEE

SEQ ID NO: 1653 - protein, 435 aa, Listeria monocytogenes
MLGKGKIAALGFQHVLAMYAGAVIVPLLIGGALGFNGEEMTYLVSIDIFMCGIATLLQLTVNRFFGIGLPVVLGCAVQAIAPIILIGQDMGIGAIYGSIIVSGLFVLLIAPFFSKVVRFFPPVVTGSVVTVIGLTLIPVAINNLAGGEGAKDFGSMYNLGLGFGTLLLIILVYRFGQGFSKAIAVLIGLVGGSLFAALYKGISLGPVSEASWFHMPKPFYFGTPTFEWPAIITMILIALVSMVESTGVYFALSDITERKLTQKDLTRGYRAEGLAIMLGGVFNTFPYTAYSQNVGLVQLSGIKTRKVIYAAAGFLIVLGLIPKIGAVTTIIPTPVLGGAMVAMFGMVVAQGIKMLGKVNFTSQENLLIIACAVGVGLGVTVVPDLFNAFPSFVRLFTSNGIVAGSVTAITLNIIFNMIPHRKDKKVADPEPQHAK

SEQ ID NO: 1654 - protein, 352 aa, Listeria monocytogenes
MNGKQVMVGGLSLLLVGAGLGAFGSTAQAATDDASVMPDISNKQVLVGYWHSWKSSGKDGYQQGTSADIALKDTPKAYNVVDVSFMKGDGVNRIPTFKPVGINDSDFRAQVGALNKEGRAVLLALGGADGHVELKAGDEEAFANEIIRQVETYGFDGLDIDLEQSAITAGDNKTVIPAALKIVKDHYKAEGKNFLITMAPEFPYLKPGSAYESYLTSLANYYDYIAPQLYNQGGDGVWVDETNQWIAQNNDTLKESFLYYMADSFINGTRGYLKIPANKFVFGLPANVDAAATGYVTDPQIVKNVFTRLQAKGTPVKGIMTWSVNWDAGKNKAGVPYNNSFSNAYGPIVGTK

SEQ ID NO: 1655 - protein, 89 aa, Listeria monocytogenes
MAKKSKVAKHERQQALVEQYAELRRTLKAEGRYDELRKLPRDSSPSRLHNRCELTGRPHGYMRKFGMSRIRFRELAHQGQLPGVKKASW

SEQ ID NO: 1656 - protein, 290 aa, Listeria monocytogenes
MTENRENLLVVDGMALLFRAFYATAVSKQFMFNQQGIPTNGVQGFMRHMFAAIRQSNPTHTLICWDMGSQTFRNELYDGYKAGRTAPPEEMIPQFDLAKEVAAGFGFVNLGVPGFEADDCIGTITVQASNTIATTVLSGDKDLLQLIAPTNDVWIMQKGYGNYKRYDEATFFEEMGISPRQFIDVKALMGDTSDGYPGVRGIGEKTAIKLIQEYESIEGVLNNLDKLKPAQQTKIQEDLAMLELSQKLARIHTEVPLEIDLPSLKYDGFREDAFAVVEKYGLKTLTRDIE

SEQ ID NO: 1657 - protein, 152 aa, Listeria monocytogenes
MKNISDIIEAYLKQVLESSEAVEIKRSEIADKFECVPSQINYVINTRFTMERGYIVESKRGGGGYIRIIKVKMNDKLQLLEAIISMVHDKKVSQSFSEDVILRLLEEEVITKKEARLMVAALDREVLILPLPDRDILRSRILEAMLVALKYD

SEQ ID NO: 1658 - protein, 140 aa, Listeria monocytogenes
MEVILKFGILGFGAIFGYLFGEVDLLVKVLVCFIVADYISGLLASGYLGELSSKMGFKGIAKKIAILILVAIAHQIDLILGTHNTTRDAVIFFYLANELISILENFVRMGMKVPEVLKNLILIFDAKSGEDEEKHDKDMD

SEQ ID NO: 1659 - protein, 172 aa, Listeria monocytogenes
MICQRCGENKAVIALQQLNELGKVESLYLCENCATDEALSSEKDLVKAMDTFSEVALDFLTLLQKEENTQKEVVCENCQLSFEEFLKTNRVGCPECYSAFEAQLVPIIGRVQNGYKKHIGKVPAEVERAEGVQNEISRLQEKLAKLVKNEEFEEAAVVRDEIKALKAGGEDK

SEQ ID NO: 1660 - protein, 340 aa, Listeria monocytogenes
MNVFEPRLSSWLENAGDDDDVVLSSRIRLARNLKDEQFPIYEQKEEIVDNIAEVFDDNFILIKMNQISLLQKALLVEKHLISPYMMNKSEYGAVLLNEEENVSIMLNEEDHLRIQCMTPGLRLFDALEAALQIDGYVEEKLSYAFDKEFGYLTSCVTNIGTGMRASVMVHLPGLVTTKRIKSVIEAIRSLGFVVRGIYGEGSMPASNIFQVSNQVTLGKTEAEIVEDLTQVMEQIIMQERVARTTLKQKFHIALEDRVFRSYGLLMNCRIISMKEAADAISDIRFGVELGFFEHISRQKMNELVLFSQPAFLRREAGRDMDELEEKVIRAKVIREILGDK

SEQ ID NO: 1661 - protein, 820 aa, Listeria monocytogenes
MMFGRFTQRAQKVLALSQEEAMRLNHSNLGTEHILLGLVREGEGIAAKALYELGISSEKVQQEVEGLIGHGEKAVTTIQYTPRAKKVIELSMDEARKLGHTYVGTEHILLGLIREGEGVAARVLSNLGISLNKARQQVLQLLGGGDATGAGRQTNTQATPTLDSLARDLTVIAREDNLDPVIGRSKEIQRVIEVLSRRTKNNPVLIGEPGVGKTAIAEGLAQQIVRNEVPETLRGKRVMTLDMGTVVAGTKYRGEFEDRLKKVMDEIRQAGNVILFIDELHTLIGAGGAEGAIDASNILKPPLARGELQCIGATTLDEYRKYIEKDAALERRFQPIKVDEPTVEESIQILHGLRDRYEAHHRVAITDEALEAAVRLSDRYISDRFLPDKAIDVIDESGSKVRLKSFTTPKNVKEMENNLSDLKKEKDAAVQGQEFEKAASLRDKEQKLKKSLEETKANWQEKQGLDHSEVTEDIVAEVVASWTGIPVAKLAETETNKLLNMEKLLHERVIGQDAAVKAVSLAVRRARAGLKDPKRPIGSFIFLGPTGVGKTELARALAESMFGDEDSMIRIDMSEYMEKFSTARLVGAPPGYVGYEEGGQLTEKVRQKPYSVVLLDEIEKAHPDVFNMLLQVLDDGRLTDSKGRVVDFRNTVIIMTSNIGAQEMKQDKSMGFNVTDPLKDHKAMEHRVLQDLKQAFRPEFINRIDETIVFHSLQEKELKQIVTLLTAQLTKRLAERDIHVKLTEGAKSKIAKDGYDPEYGARPLKRAIQKEVEDMLSEELLRGNIKVGDYVEIGVKDGKLEVRKKDAPKKKTTSKKVKAK

SEQ ID NO: 1662 - protein, 457 aa, Listeria monocytogenes
MAKAKRTTKFVCQACGYESAKWMGKCPNCNEWNQMVEALEPSKKSRSAFNHTGEPSKATPITQIASETEKRVETNMPELNRVLGGGVVPGSMVLVGGDPGIGKSTLLLQVSAQLTLTNKKVLYISGEESIKQTKLRAERLQVSGDNLYVYAETNLEAVQETIDFVKPDFVVIDSIQTVYHSDVTSAAGSVSQVRECTATLMRIAKMQNIAIFIVGHVTKEGAIAGPRLLEHMVDTVLYFEGERHHAYRILRAVKNRFGSTNEMGIFEMRDVGLVEVANPSEVFLEERLEGASGSTVVASMEGTRPVLVEIQALVSPTMFGNAKRMATGIDYNKVSLIMAVLEKRVGLMLQNQDAYLKAAGGVKLDEPAVDLAVAVSVASSYRDKPTRSTDCFIGELGLTGEIRRVARIEQRVQEAAKLGFKRIFIPKNNEGNWKIPKDVQVVGVETIGEALKKALPD

SEQ ID NO: 1663 - protein, 357 aa, Listeria monocytogenes
MLTWVIRVCFLILGGTTGVFSLPALWVKLGIGHILLINNPYTDALIGALIFYLITFWAVKYVEAALNWLEEKLAKIAIATLVYGGLGLFVGLVIAFFASNALSQTNIPLLNSVVPVILTLVLGYLGFRIGISRRNEFGNFVNNRNAKKRTPEEEKTEEKSKKTYKILDTSVIIDGRIADILTTGFLDGTVVIPLFVLAELQHIADSSDTLKRTRGRRGLDILNRIQKEDAIQVEMYEGDFEDTPEVDSKLVKLAKVMGGIVVTNDYNLNKVCEFQNVPVLNINDLANAVKPVVLPGEKMTVLMVKDGKEHNQGVAYLDDGTMIVVEDGRKFINETIQVEVTSVLQTSAGRMIFAKPS

SEQ ID NO: 1664 - protein, 178 aa, Listeria monocytogenes
MTKIVKMSEKNEHGTLEQFYPETHAEAVKGLVSVSEEEKTIWDQKESTAGAEQKANTALNSAKDYVDTIGEGTVIFKGANLMGAGQSFKWDASKLKFGMTLLFSRYDAANNTPQDYYYHSVFLSKAQLVELAGKGILVQMPSTTYGDRKYLYVSTTGLSGHFDNSNYAAWALRQVTIM

SEQ ID NO: 1665 - protein, 232 aa, Listeria monocytogenes
MNYELVFLAAGQGKRMNAQKNKMWLELVGEPIFIHALRPFLADNRCSKVIVVCQEEERKHVKELMSQLNVAEHRIEIVKGGSERQYSVAAGLERCGTGRVVLVHDGARPFITLDIIDRLLIGVEQSKAAICAVKVKDTVKRVMNGVVQETVDRENLWQVQTPQAFELPILRKAHQLARKEQFLGTDEASLVERIPCPVAIVQGSYYNIKLTTPEDMPLAKAILGELGGIAND

SEQ ID NO: 1666 - protein, 159 aa, Listeria monocytogenes
LRKSRWLLILLLLIVLVALSACEDSGNGDISGAPAKMEKQHFPPTDTKKGWIELLATDGISSQDNLPCVYEEAESVEKLEVHMKELSTASLTYIYIDGHIVQMEQGGDELSFQIQLSKTELRKGIHELAVVQYQENNPETKKVEFLKRANYEVKQIKND

SEQ ID NO: 1667 - protein, 300 aa, Listeria monocytogenes
MGSYGELIREIRLSKGLTQKEVYTGIISRSYAIGFEKGKHEITLSLFEEILKRIMVPLDEFFFIYRDFSSTEDDSFWIDFVELSGKNDVVGMQALLDKITLERTEQSEVRKAILHTRIQTINHYLRTNVFDESNISDEYKKIIHDYLWKMQTWTLEEVRIFSNGISFFEEEVQIHFYQIMLKSYEKYRYYDRGRLLFCHLFANLTDELIIQNKINYANLVLEKLKEASETSGSFNSAFYRIVANYYQGAIWMKEGEVEKGYRQAKRAIQTWKELHYEAIADLYSVVLKQFLEKENIQVED

SEQ ID NO: 1668 - protein, 290 aa, Listeria monocytogenes
MISYGELIRQIRQSKKISQKEVYTGVISKSYAIEFEKGTHAISSLLLEKIVAKLMVSMEEFFLMYHQEALPEKEDFWEAYARTCKTDEASAWESLYQKISLEKGKVNQVKSAAIKLELDHIKGKQVADKKAVQILENYLIEAVFWTLQDIFLFTRMMHYLPLKSRVPFYYKLLNTLDRYRHFERGRSISQSALASIMDDFIEKNEIEYMELMIKSLEKISEDCDGTYSKILCMYYRGIVRWREGEKREGSEEIEQAVAILRALGYENKAAEYETMYRQFARENNDIKTME

SEQ ID NO: 1669 - protein, 226 aa, Listeria monocytogenes
LLEKKYQIHLQNHYDATSRQVQKKEIKVLKKRKNLLIGEVFPYQICLESTMEYSRFMLWFEKEVQKIVKELWNQHFIIKLTLSQLHFRETILFLEHLKDFSKRITIEFIGEDTPEIKKHFSVQEQEAFFIGKLRMLKKWKFIISKHIEGCSVEQTLAFTPCLHEIKYTMSQQARMEENIIDLHMFIDFWEYWAIHKKLKFVVEVKEADFITKSLMHKKVHVQFENA

SEQ ID NO: 1670 - protein, 144 aa, Listeria monocytogenes
MLDIKKIKEILPHRYPFLLVDRVISVEEGKKVTAIKNVTANEEFFNGHFPEYPVMPGVLIVEALAQTSGIAMMQSEANKGKIGLFAGIDGCRFKRQVVPGDQLLLEAEITRMRGAIAKAKVKATVEGDLVCEAEIMFALSDLPK

SEQ ID NO: 1671 - protein, 159 aa, Listeria monocytogenes
MTEIKRMLQTKEDNSKEQFYPETHVAGIVGLTEYVSGQLPTGVVSVNGKAGRVLLDAEDVHAAKKSHTHEVATYTTDGFMSSFDKQKIDQLVSPEAGVTSINGKTGIVDLFASDLDAAEINHTHAEATTTESGFLSIDDKEKLDAIQVIALETIKEVIE

SEQ ID NO: 1672 - protein, 121 aa, Listeria monocytogenes
MINQVTLVGRLTKEPELKWTTEDRAVLNLTLALNRFGKNKRVDNDADFIQCVIWGKRAEATAEFCTKGQLVGVVGELQSRNYLNKEEQKIYITEVLVHQIRYLSSRNKDERVVNIPQEEDE

SEQ ID NO: 1673 - protein, 277 aa, Listeria monocytogenes
MKKTVVAIAAGLIIAGSGSTQAFAAEYKVQDGDSLWKISNENNVSIKQLKEDNNLSSDIIFPNQTLQVNSSEKKSTTNNNSEYTVVAGDTLGHIAVDNGVTVNQLKSWNNLSSDLIIVGQKLSIGNKASASESNTSKNNSTANNSANNKVTEQPKEEKAAPTTQKSTSSNEASSNSSSAQGNVSKELTVTATAYSKAEPGMGHMTATGIDLNDNSRVIAVDPSVIPLGSKVYVEGYGQAIAADTGGAIKGNKIDVHLNSVQEANNWGVKQVKVQILD

SEQ ID NO: 1674 - protein, 244 aa, Listeria monocytogenes
MKKQEISILNIPFYNTTQAGFVEELYMAAKNGERRFVVTANPEIVMHARTDKEFEAILGQADYIVPDGIGIIMASEKLGEPLKERVTGYDTMVGLLNKPLNCYFLGAKPEISEVVEAKVREKFPQAVVCGVHHGYFDVLESEGIAKEILVSQPDVIFVALGSPAQEKWILSQIANFTKGIFIGVGGSFDVLTDSVKRAPKIWIKLRLEWVYRLLSNPSRWKRFFAIPQFMLAIRKERKRLKKGE

SEQ ID NO: 1675 - protein, 374 aa, Listeria monocytogenes
MYFQEARLIHVELPLIAPFKTSYGELNSKDFYIIELVNEEGIRGYGELEAFPLPDYTEETLSTAISIVKQHLLPILAQKEIRTPQEINQMFSWIQGNEMAKAAVELAVWDAFAKNEKLSLAKMIGAEKDSIAVGVSIGLQPDAETLVRLVSQYMDEGYERVKLKIAPKKDIQFVKAVREKFPNLSLMADANSAYNREDFWLLKELDHFNLEMIEQPFGAKDFVDHAWLQKKLKTRICLDENIRSLDDLKQAHMLGSCQAVNLKLARVGGMSEALKIAKYCSDNNLLVWCGGMLEAGIGRAHNIALAARAEFTFPGDISASNRYFNKDIVSPAFVLNQGKLTVPTGQGIGVALDLDVLQKYTKSTERILLNKGWS

SEQ ID NO: 1676 - protein, 350 aa, Listeria monocytogenes
LLIWSILISFAVGIIMVPIIRKFAFRINAVDTPRERHKHTKTTATLGGLAIFISFSVGMILAPIDKSGFLPIYFGALIIIATGFIDDIFDLSPKWKMLGQILAALCVTVWGDITINFINVPFYGQVDFGYFAIPLSIIWIVAIVNALNLIDGLDGLAGGISIIALMTIAGMALLLKDVFVAPVALILVAAVAAFLIYNFPPASIFMGDTGALFLGYMIAVLSLMGFKNVTFISLLVPLIILGVPLSDTFFAIVRRLKERMPISSADRSHIHHRLMALGFTEKQTVLLIYCMALLFSMTGFVFSFSTTWGAMLLLLLLIFSIEIIVEFIGLIGEDYRPILNLLQKIHRKRK

SEQ ID NO: 1677 - protein, 352 aa, Listeria monocytogenes
MSKGTDDSRRSSKKYKRRRKILFWILIPVMCLVLAGVGYGTYLFSKTKLAADNSYDNVRNGKASTLRTNDIEPIKDSFSILIIGVDTSSTRAENGNPRSDSLILATFNVKDSRVEMTSIPRDSYVHIEDSAKDIDKYTKINAAHAYGGPELTMKTVEEEFKIPIDYYVRFDFDAFLKIVDALDGIDVDVPVDFTEQDSKDNAGAITLKKGPQHLNAEQALALARTRHIDSDIERGKRQQLIIKSIVSEATSISSVSKYSDIIEVVGDNMKTNLTFNQMLSIAKYGMTNKIDIKSLNLKGDSNPMDGIYYYKLDESSVQSISNEFADELGIKQPFPGAAPYSDESSSTTSSSN

SEQ ID NO: 1678 - protein, 201 aa, Listeria monocytogenes
MGNWNIKKDHKNIEKRMSLSMSTNVFIQLPDTILTKRTTLKKTSIADATTLFDIWSDDEVAQFMNIEKFSTILQAEEMIQAIENEPNACRYTIFTTDDSLNAIGSLGINDINKTNQTIEIGYELAKSHWRQGFMFEILTTFLTTVKPYLPYKVLTAKVLPDNVASIKLLKKLGFELTTTGQELDLHSGRICEISNYRMLLK

SEQ ID NO: 1679 - protein, 211 aa, Listeria monocytogenes
MLDHYLTIHSDGKHEIIIEKSRFICHIKRATTETEAQTFIQEIKKEHRDATHNCSAYIIGENDQYQKAHDDGEPSGTAGFPMLEILKKKSLKNVAVVVTRYFGGTKLGAGGLVRAYGSAVSEAIQAIGIVECKLATIVECSFAYPLLGKVENALELKAYQIDKKEFTEKVVLHIFVDNDELQDFFNWITEISNGQLEYKEGPQKYREKDVT

SEQ ID NO: 1680 - protein, 228 aa, Listeria monocytogenes
MALKIMIVDDHQLFREGIKRILELEDSFEVVAEAENGKNIVAKVREYKPDIVLMDINMPTVNGLDATEMLVRQFPSIKVIVLTIHDTDEYVTEALRAGAVGYLLKEMDAHELVEAVKIVDNGGAYIHPRVAIKLIREYRHLASTNTSQGVYGYQQPEVKMPLHILTHRECEVLQLLTDGKSNRGIGETLFISEKTVKNHVSSILQKMKVNDRTQAVVTAIKHGWVYIR

SEQ ID NO: 1681 - protein, 283 aa, Listeria monocytogenes
MNEKIAVVTDSTTYLPDEVKEQLRINVVPLSVIIDGKSYREGEELSATDFYRKVKEAENFPTSSQPAPGEFIHLFENLKEQGFDTVISIHLSSGISGTFQNAASAGELIEGLNVVAYDSELSCMAQGMFAVKAAEMALANEPLDQIIQKLDKIKQAQDAYFMVDDLNNLQRGGRLNGAQALVGSLLQIKPILHFNDKQIVLFEKVRTQKKALKRIEDILQKAVQNKTAEKAYVIHGNDLAKGEAWLAQLEAKFPEVTFELSYFGPVIGTHLGEGALGLTWSIK

SEQ ID NO: 1682 - protein, 191 aa, Listeria monocytogenes
MKLDLWKWEMLLQGREFRNKTNDNWQKLMDWSDFISTGLSAIYVYVNKADATLNNKIDTVDKAVNARVNELISGTEQLSEVVDARSDAFGARYPVLRERLNQEQLNFSKKSTIQFDASTIISMEKQDIGLLTSKKISEAQTVCFLNISSLDEEADIVLEKTGETSFSDNLTSLVFAKIGTNERYQMEPVGA

SEQ ID NO: 1683 - protein, 439 aa, Listeria monocytogenes
MDIFPGRLYQEREIESNEGLREVVAIESNKCFRCGNTDAQLFGKMCCALCKREDCIYCRNCIVMGRVNSCQKLYYQQAMLLPKTKEILLRWEGVLSAGQRKASNAVVINLKGKMDMLLWAVAGSGKTEMMFEGMDWALRQGFRICVASPRVDVCLELLPRLKEAFPSMDIVCLYGDSKDNYQGEQFVIATTHQLIRFYETFQVIFIDEVDAFPYAKDPFLEYAVMKARTKEGSTIIITATPEKKWQEECVKGKRNFVKIPGRYHRKKLPVPRTCWIGPWKKNLAKGKISPKLIQWMNGVEKKDQPALIFFPEIDAMNKFAKALENKGYIRPVTVHSADELRKEKVEWLRKGKIKLLLTTTILERGVTFTDVQVAVFGSEGRIFTEAALVQISGRAGRKISHPTGDVCFFHYGKTIEMKQAISHIQKMNQQGVIEGMLDD

SEQ ID NO: 1684 - protein, 218 aa, Listeria monocytogenes
MTNCLLCFQPVRQSASWEISWLFEPLPICCNLCLAGFEKLTGLLCKNCSKESLDDVCEDCQSRTHFLDSNKSIYRYNDFAKEYMKKFKFQGDYEIGAIFKKELSTFLSEKKEKIVPIPVSETRKLERGFNQTTAILKQSGILYEELLAKKHTEKQSKKTKRERLASEQAFYFSGKEILKSTEVILFDDIYTTGSTLNLAAQILKEAGVHKVSALTIFR

SEQ ID NO: 1685 - protein, 187 aa, Listeria monocytogenes
MLKYNIRGENIEVTEPIRDYVEKKIDKLERYFTETPDANVHVNLKVYSDKNAKVEVTIPLPNLVLRAEETSGDLYASIDLIVDKLERQIRKHKTKVNRKFRDKGAERDYFAYSDVNGSTPPEENEGDFDLEIVRTKQFSLKPMDSEEAVLQMNLLGHSFYVYTDAETNGTNIVYSRKDGKYGLIETN

SEQ ID NO: 1686 - protein, 172 aa, Listeria monocytogenes
MEKRQTKFCKESLVIKTSRVFPSDTNNHNTLFGGRLMTYIDDTASISASRHCRTEIVTASTDSVDFLKPIKNDHSVCLESYVASTGRSSMEIFVKIIAENLKTGERYLAATSFLTFVALGADGKTVEVPLVEPETEEQKRIHAGAEARSIARKIRLKENQSLAESLSTDIPW

SEQ ID NO: 1687 - protein, 596 aa, Listeria monocytogenes
MKIWNSIVGKIWSTIILLLIGILVISGFLVAMIYEKNNITRITNELEDKTASIITVMQENNEVISAENNNDSALILLDDTMGVIIEQNGKSVYQSQSPDTISSASANKLIQDKTLDKALEKDNSVTMKYNFKTEKSSLPVEISAQKFKLANGETGVVYVYQSYHDILKVNEKTMSTLIISGIIAIVITSILSFVFSSRMAFPLREMKKIAIAVSKGNFDNRVPTYTHDEIGELGVAFNDMAKQLKYNVSALRQEKEQLSNILVGMADGVIKFSVDKTIILSNPPAEEFLHNWFFSPENTEKVLIPVALNELLNDTLEKKESQVGEITFADHTYVAILTLLYTGEHVRSIVAVIRDMTEEKQLEKMKSDFVNNVSHELRTPISMLQGYSEAIIDGVAQSDEEVREFAQIIYDESLRIGRLVNDMLDLARMEAGFNQMDNQKLPLAPLLRKVISNFDVLAKENFVELGLELETPDLEYSYDPDRMEQVLINLIMNAIRHTGKEGYDGKVILKQTIDVARSNLVITVSDNGSGIAEEDIPYLFERFYKVDKARKRGKAVGTGIGLAIVKNIVEAHNGKISVESELGKGSDFIITLPLYK

SEQ ID NO: 1688 - protein, 238 aa, Listeria monocytogenes
MSEQVRVLVVDDEDRIRRLLKMYLERENYRIEEASDGDQALSMALNNNYEVILLDLMMPGKDGIEVCRELREFKSTPVVMLTAKGEEANRVQGFEVGADDYIVKPFSPREVVLRVKAVLRRAKQSSEESAGGTPGDIITFPHLKIDNEAHRVIVDGKEIGLTPKEYDLLYYLAKSPDKVFDRESLLKEVWRYEFFGDLRTIDTHVKRLREKLHDVSEDAARMIVTVWGLGYKFEVPED

SEQ ID NO: 1689 - protein, 99 aa, Listeria monocytogenes
MATEIRVLKNVDDTVFYPKTHVTAVEGLDSATTTTSGLMPASDKTKLNGIEANAEKNNVTAIDIANWNKKQDAILVSENGSNFKITVTNAGELKATKVE

SEQ ID NO: 1690 - protein, 244 aa, Listeria monocytogenes
MERLQKVIANAGITSRRKAEKLIQEGKVTVNGKVVTELGVKVSGTERIEVEGIQLTKEEHRYFLFYKPRGTVSAVTDDKGRTTVADYFADIPERLYPVGRLDYDTSGLLLMTNDGDFANLLMHPKNEVSKTYIARIKGIPEREVIRQLERGVVIDGRKTAPAKVKVRSSDKTKDKAIVEITIHEGRNRQVRKMFEAVGFEVQKLSREEYSFLNLRGLNAGERRELSHHEVKQLKTEARFGKNKK

SEQ ID NO: 1691 - protein, 198 aa, Listeria monocytogenes
VNREEQLGVLESLLFAAGDAGLSTEQLTEVMEITHIEALNLLELLSERYNESADRGLILLELAGTFQLATKKAHAEFLRKLVEVPSNTVLSQASLETLAIIAYRQPVTRMEVDEVRGVQTDGPIRTLVAKGLVTDKGRVDGAGRAKLYVTTSEFLDAFGLNSLEDLPKLADPATDEPDQNEMDLFFDRFNQSKEQEEE

SEQ ID NO: 1692 - protein, 249 aa, Listeria monocytogenes
MVEMNFKVDAFEGPLDLLLHLIGQLEVDIYDIPMAEITDQYMEFVHTMQEMELDVASEYLVMAATLLAIKSKMLLPKQELEIDYDTLEEEEDPRDALVEKLMEYKRFKEAAKELKEKEAERSFYFSKPPMDLAEYDDGTKVAELDVSLNDMLSAFNKMLRRKKLNKPLHTRITTQEISIDQRMDSVLEKLNLQVNHRLRFDELFEEQTKEQLVVTFLALLELMKRKLVEVEQAESFADLYVQGKGEEIS

SEQ ID NO: 1693 - protein, 436 aa, Listeria monocytogenes
VTFERLGTMNVNAEGHLEIGGVDTLKLADKYGTPLYVYDVALIRDRARGFKKTFEELGVKAQVAYASKAFSAVAIYQLMAEEGLSLDVVSGGELFTAIKANFPPERIHFHGNNKSAEEIHMALDYGIGCFVIDNYYEISLLEDILIERNEKASVLIRVTPGIEAHTHDYILTGQDDSKFGFGLTNGQAEKAIKQVLHASASFDLIGLHCHIGSQIFETTGFKLAARRIMDKLVEWHQTLGFDSKVLNLGGGFGVRYTAEDEPLEPSEYVRQIMDEVRDVAESNDIDIPEIWIEPGRSLVGEAGTTLYKVGSRKEVPGIRNYIAVDGGMSDNIRPALYDAHYDAVLAANPEKVAEETVAIAGKCCESGDMLIWDLPLPKSNAGEVLAVFCTGAYGYAMASNYNRIPRPPVVFVENGVDKLIVARETYENLVQNDLSL

SEQ ID NO: 1694 - protein, 272 aa, Listeria monocytogenes
MSLEKVNEAVAKIRESYTGTPKIGLILGSGLGVLADEVNQPIKLSYSEIPHFPVSTVEGHAGQFVFGELENKEVVAMQGRFHFYEGYSMQDVTFPVRVMKELGVEVLIVTNAAGGVNELYSAGDLMLISDHINFTGTSPLIGPNDEHFGPRFPDMSEAYNLALRVDARLIAQELNLTIREGVYAGFSGPTYETPAEIQMMRTLGADAVGMSTVPEVIIANHAGLRVLGISCITNMAAGILDQPLSHTEVIETTDQVRSTFLQYVKAIVAKIS

SEQ ID NO: 1695 - protein, 394 aa, Listeria monocytogenes
MPDKFKRVHVVVMDSVGIGEAPDAAKFGDFDVDTFGHIAKHVGGLKMPEMGKLGLSNIREIEGIKKAEKPLAYYTKMQEASNGKDTMTGHWEIMGLYIDTPFRVFPDGFPDDLINQIEEKTGRKVIGNKPASGTEIMAELGEEHVKTGALIVYTSADSVLQIAAHEDVVPLEELYEICEFCRKITLDDPYMLGRIIARPFVGEPGAFVRTPNRHDYALKPFKPTVMDALKDGGKDVIAIGKISDIFDGEGVTESIRTKSNMDGMDQFIAVLDKDFNGMSFLNLVDFDALFGHRRDPQGYADALVDFDGRLVEVMEKLTDDDLLIITADHGNDPTYTGTDHTREFVPLLVYSPRFKNGGSELELRKTFADLGATVADNFDVKMPEYGTSFLRDLK

SEQ ID NO: 1696 - protein, 297 aa, Listeria monocytogenes
MNDLIEDFLHFLIVERGLSANTIKAYERDLHYFVSYMDVTKELTDPNTLERSDIVGFMAFARQEGKSPRSVARYIASLRSFFHYLMHDGKMSHDPMIQIETPKQAQGLPKVLNLDDVEKLLSSSDTSTPLGLRDQAMMEILYATGLRVTELVSLKMDDLHLHMGFIQTIGKGDKERIIPLGKTATTVLEKYLEEARPKLRRPKYRNDFVFLNHHGQGLTRQGFWKILKGIAKESGIEKPITPHTLRHSFATHLLENGADLRSVQELLGHADISTTQIYTHVTKLRLKDVYKQFHPRA

SEQ ID NO: 1697 - protein, 368 aa, Listeria monocytogenes
VTLQQKELFQKSPLLLENGETLSPVLVGYETYGTLSASRDNCILLEHALTGTAHAAKHFEDDAPGWWDDYIGPGKTIDTDKYFLVCTNVFGGCSGTTGPSSINPKTGEPFRLQFPGFSIKDIIKVQRELLEQLGVTRIVSVIGGSMGGMQATEWAIDYADITDSIINIASPLAAGPDAIGYNLIMRMAILNDPDFNGGNYVGQPEGGLATARMVGMMTYRTSELFSKRFERFTVAESSPAAFSKEHFQIESYLQYQGDTFVERFDANSYLYLTKAIDLFDVTAPAKDDLPAFSKIKIPYLLIGITTDQLFRIHDLRRGYELLKEWDVPVTYHEVASEYGHDAFLVEKEVPKFEPLIRSFLSNLPVKSI

SEQ ID NO: 1698 - protein, 425 aa, Listeria monocytogenes
MSNEYKFETIQVHGGHTPDGDTHSRAVPIYQTTSYTFDSPEHAAALFGLQETGNIYTRIMNPTTAVLEERLTLLEGGIGAVATASGMAAITYSILNIAGSGDHIVAAATLYGGTHTLFSHTFKTFGIDVTFVDPNEPENFEKAIKDNTKAVFIETIGNPDINIVDIEKVAKIAHASDIPLIVDNTFATAYLNRPFDFGADIVVYSATKFIGGHGVAIGGAVIDSGKFNWANGKFPKLVVPDDSYNGLSYTNDVGAAAYITKLRVSLLRDTGAALSPFNAFLLILGLETLSLRLEQHVKNAKQVANFLNDHPKVAWVNYPGLKDNKYHELAQKYLPKGPGSIFTFGVKGGYEAGKKVIESVELFSHLANVGDAKSLIIHPASTTHQQLSEEQQLTAGVKPESIRLSIGIENADDIIQDLTKALEQI

SEQ ID NO: 1699 - protein, 175 aa, Listeria monocytogenes
MKTFTRILVLLAGIAMIILGVWFLFHPGISLLTSTLMFGFLLLISGIFHTISYFSDRKSQNVSGWVLADGILSILLGFLLLFNEFDGTLTLVLLFGMWVLFAGIMRTIGAFTAKQNNVQGWGWILTIGIIGIIVGFIALFNPVVSAIGIVLVVAIFFIVQGIGAIATFFFIGKNS

SEQ ID NO: 1700 - protein, 233 aa, Listeria monocytogenes
MSLLNEENSFYNVDLLNLLKDSSEAVLPYKRIRFRRNQQILAEGAETDYFYIIEDGVVSMSKNTCKEDSIINFLGKQECIGPLTLLGGAKSPVNYTTISEVSVYQFERKYVLNKFLSSPDVFWQMNALMQSMVTPMLEREGYVNLPSSEKVLAGLIACGERFGRIESDGSCLIPYYFTQKILGNYLNLARAYVATNLRKLEEDGIIALSPKPWRVNNFEIHKQKLKENHEPYI

SEQ ID NO: 1701 - protein, 378 aa, Listeria monocytogenes
MDYVIIQSMDKEVEEILTDIDYGSFSYDYEKNTSRAISFTVNKTKQNAAIFDLVGNEAILTYQGQQFVIKKCTPKSIGGTLSKQITAQHICYTVQDHVQYNVKSGRKKYSIQTVLEFALQDNVLGFSYEIQGSFPLVELEDLGNKNGLELVNLCLEEFGAILFADNKKLYFYDEKSWYVKTEKQFRYLYNTEEVSVDTNTDNLKTEIKCYGKQKENADKLTGDNKYMAVVTYTSPNEAIYGKRMANAKSDDKITNNDDLLIFAKKQILDVPETALTISYKGKEPVSERDVWYFIHEPMGFETEVKVTKIKSSHPWSKKFQEIGFSNSRRDMVRIQTQIANQVKKASVDTNKINSFSSIAMNAYDSRILTEVVGVVDGD

SEQ ID NO: 1702 - protein, 182 aa, Listeria monocytogenes
MRDQKLKFLVVDALFAVIIALLAQVAIPLGPIPLTGQTFAIGLAATILGARHGTISVLVYIVLGAVGIPVFQGMTAGIGIIFGPTGGFIIGFIFNAFLTGWLLEKTKFTVPYAIVANILGAIVTLIFGVLWLKVSTGLDWPTAFLTGMVPFIIPGIIKAVFAALLGIIIRDRLIKAKLLRAS

SEQ ID NO: 1703 - protein, 228 aa, Listeria monocytogenes
MKLLMIEDNVSVCEMIEMFFMKEEIDATFVHDGKMGYEAFFKDDYDIAIIDLMLPNMDGMTICRKIREVSDVPIIILTAKESESDQVLGLEMGADDYVTKPFSPLTLMARIKAVTRRKNSATSTENNEDILETTYFKISKRTREIFYQDELLDALTPKEFDLLYFLMQHPRQVFSREQLLEQVWGYQFYGDERTVDVHIKRLRQKIATETKPFLHTVWGVGYKFDETE

SEQ ID NO: 1704 - protein, 479 aa, Listeria monocytogenes
MKQMKFKYAYQLFFTQFIILLIACIMIGVLVSHSLKDYFYQSQVDDLTSYGQTISRDIRYSPQDATMQVLNTYQRILDVKKIHYTIKNANDETIYPTQMNQPLPKDFSISADDKKKLESGETVSKKIDNRFNKEMTIVYVPIMNGDKFVGSIVLNSPISGTEQVIGTINRYMFYTILLSITVALILSAILSKLQVNRINKLRAATKDVIQGNYNARLKENNFDEIGALAIDFNKMTQTLETSQEEIERQEKRRRQFIADVSHEMRTPLTTISGLTEGLVNDIIPKSETDRCIALIDTEARRLTKLVNENLDYEKIRSNKIKLQKTRFNGKEFLELIKEQLDYVASEKGNTITVAIDKDMAIYADYDRLTQVFINIVKNSVQFTENGQITLTGTQDYKESVLTITDTGIGMNTEELEQIWERFYKADMSRTNTAFGESGIGLSIVKQLIEYHDGSITVTSEPNKGTSFTIRLPFFQDNEQ

SEQ ID NO: 1705 - protein, 798 aa, Listeria monocytogenes
MAEQESLALFDDTTEELFMKGTMLSTIFYNAENLFSVVRILVKETNADWDEKDIIVTGFFPALHEQEVYTFYGKMQEHAKFGQQFKADRFRKEMPQSRAGLINYLSGELFKGIGKVTAENIVDTIGDDAITKILSDPSLLNTVPKLPSGAAESLLASLRENQGLEHVMVGLNEYGFGPQLSMKIFQAYKQNAIEVLENNPYKLIEDVKGIGFQRADELGRKLGLGGNHPERLRAGILFMLDSVCMQQGHVYMEQEVLLGEVTYLLEESEGIRIDQSILVAQVEKLAEEQKIITENTRVYMPSLYYSESGFAYHVKRMLKQTEYQEQFPQSEFLLALGELEERIGVHYGDSQRQALEQALMSPMLVLTGGPGTGKTTVIKGIVELYAELNGVSLDPHAYKDGATFPVLLAAPTGRAAKRMSESTGLPAMTIHRLLGMNGQEQMDDDAERLIDGRLLIVDEMSMVDIWLANQLFRALPAHMQVVLVGDQDQLPSVGPGQVLKDILQSEQIPTVALSDIYRQKDGSSIIEMAHYIKEGMLPADFTKNSADRSFFHCTVNQIGDVVEQVVKNAKNKGFRAKDIQVLAPMYRGPAGIDILNKKLQEIFNPNDTGRRKEVQFGDIKYRVHDKVLQLINQPEKNVFNGDIGEIVSIIYAKENTEKQDLIVVQFDQTEVSYYRQEFNQLTHAYCCSIHKAQGSEFPIVIMPIVRSYYRMLRRDLLYTGVTRSKQFLILCGEEEAFRMGIERIDENKRNTTLSERLMSEDVLLEQMTNKRILTAENITEIDPMIGMEGITPEQFMVG

SEQ ID NO: 1706 - protein, 212 aa, Listeria monocytogenes
MQEGNLEEAVKLFTEVIEEHPSDPVGYINFGNVLLSMDDFERAELFFKRALELDDTVPAAYYSLGNLYYELERYQEAADSFQNATKQGMENGDLFFMLGMSFVQMEELTLAMPYLLRSVELNPEDGEALFQYGIVLARSGFYEDAINMLERVLLVKPEDPDALYNIGAAYLAWQGDIVLAKNYFERAIATGASHELAENALNAIQDLENEAE

SEQ ID NO: 1707 - protein, 246 aa, Listeria monocytogenes
MKKIAIFGSAIVLFCLLIWGYFYFNSEPSITAENAANSTKAVDVLEENDILVFTPRKSDADMSVILYPGAFVDALSYAPLANKLASSGYKTYIVEMPLNLAVFGKNRAADIIDEAPDEKFVIGGHSLGGVMSSRFAHDNENEIEGAFFLASYPDKKGSLKNASFPALSITATNDDVLNQDSYNKNKKYLPKDTTFVSIKGGNHAQFGSYGEQHGDGKAAISGPEQTYQVANALVTWLNTSVKNQER

SEQ ID NO: 1708 - protein, 371 aa, Listeria monocytogenes
LSTNNSDIRVVVGMSGGVDSSVTAHILKEQGYDVIGIFMKNWDDTDEFGVCTATEDYDDVIRVANQIGIPYYAVNFEKEYWDKVFTYFLDEYKLGRTPNPDVMCNKEIKFKAFLEHAESLGADYVATGHYAQVKKVGDEIELLRGVDNNKDQTYFLNQLSQDQLKKVMFPLGAMEKTEVREIAKKAGLATADKKDSTGICFIGERNFKQFLSEYLPAQPGEMRTLDGEVLGKHDGLMYYTIGQRHGLGIGGDGEPWFVVGKDLKENVLFVEQGFHHETLYSDSLIATDISFTTNAEKPKTIECTAKFRYRQTDTKVTVHLREDGTAEVVFADPVRAITPGQAVVFYDGDVCLGGGTIDTVWKNGQKLDYVG

SEQ ID NO: 1709 - protein, 671 aa, Listeria monocytogenes
LKKTLDRQAVDTIRSLSIDMIEKANSGHPGMPMGAAPMAYMLFAKHLVFNPANPEWFNRDRFVLSAGHGSALLYSMLHLFGYDVKMEDLKQFRQLDSLTPGHPEFGWTAGVDATSGPLGQGIGMAAGMALAESHLAAEYNQPNYPIVDHYTYAICGDGDLMEGVASETASLAGHLGLGKLIVLYDSNDICLDGDLSATFSENAADRFRAYGWQVLRVEDGNNLAAIQEKIVQAKLETSKPTLIEVKTVIGYGAPTKAGSSASHGAPLGEKEANGAKEHYEWAEEPFTVPAEVRDYLRNYKARGEKLEGAWNTMLANYKKEFPELARQLDRVLAGEVAADWNANLPTFEAGTNVATRSASGKMINAIAAELPELFGGSADLGCSNKTFIDASPAYSIQDPAGKNIWFGVREFAMGAMLNGMALHSGLRVFGSTFFVFSDYVRPAMRMAALMQLPVTYVFTHDSIAVGEDGPTHEPIEQLASLRAMPGLTVIRPADAKETRAAWEIAATNTNGPIALVLSRQDLPVLENDQEEVDAGIEKGAYIVAPANSSKPDAIIIATGSEVSLAIEAKAELAKKDIDVSVVSLSSWERFEKTTDAYKESILPKEVTARFAIEAGATFGWKEFIGSEGDMLGIDHFGASAPAKDLFNAYGFTPENVADRVEAVIAKAGVRV

SEQ ID NO: 1710 - protein, 382 aa, Listeria monocytogenes
MENRIYLDHAATSPIHPEVIQTMLGAITNTYGNPSSIHYAGREARKALDEARHTIAKSIHATEKEIIFTSGGTEGDNLALIGTALAHKENGTHIITSQIEHHAVLKTCEYLETQGFEVTYLPVDEHGIVSVESVQAALRPETILVSIMYGNNEIGSIQPIAEIGALLRDQQAIFHTDAVQAYGLLNINVMELGVDLLTTSSHKINGPRGVGFLYVKNGTRLAYQMHGGEQERKRRAGTENLAGICGFSAASSIMTNERELKNEEYISFKKRMAEIWRSAELDFEVNGLEADTLPHVFSVRFPGVSIEQLLMNLDMEGIAVSSGSACTAGTVDPSHVLVALFGENHPAIQETVRISFGLGNHLEEVEMAATKISEVVTRLMKI

SEQ ID NO: 1711 - protein, 160 aa, Listeria monocytogenes
LATEKVFPMTLDGKAKLENELQELKTVKRKEVVERIKIARSFGDLSENSEYDSAKDEQAFVEGRITTIENMIRNAQIIDAAEAHNGLVTLGNTVTFIELPDGEEETYTIVGSAEADPFEGKISNDSPIAKGLLGHKEGEEVTIQTPAGDMSVKIEKITAS

SEQ ID NO: 1712 - protein, 207 aa, Listeria monocytogenes
MADKRQSNNRRIKQNLVEGSRSQQNTKRKKTNLVLNVLIIVVSLLIIGSLYFVLFKTESDPAQQENKTASSTAKKEDAAKSSEKKKDSSDDKTTETTESDDPNVAKVITKDWKPIGTEQTGDHVNSYSSTSVDWQEKRKAFSVATDIPVSNTSLWFVEQGADPATQAIGTLSTKENPDKAYRVYITWVDGEGWQPTKVEELKTNDKR

SEQ ID NO: 1713 - protein, 233 aa, Listeria monocytogenes
MTIGIIGAMEEEVELLKNSMSSVEEIVIGGAKFYIGEIASKEVVLLESGIGKVNAALGTTLMADRFKPEVIINTGSAGGMAEGLAVGDVIISDRLAYGDVDVTEFGYTYGQVPRMPAFYQGDAVLLKKAETIYREYFATSENKAVYGLVVTNDSFIMRPDQHEIIRTFFPDVKAVEMEAAAIAQVAYQFDIPFLIIRAISDLANQEATISFDEFIHLAAKQSATCIIELLKTI

SEQ ID NO: 1714 - protein, 602 aa, Listeria monocytogenes
MSKDYSLTWDLENIYAGGSGSEELQQTLQEVKADLDSFVVNVSEWDVPENVEASAEFLLLVNQNADISKILLTAGSFLECLASADINDTRANELSALIYQYVATLATAEDEWHDKFAQVSDRVWDELMEQNGLSQISFILSEARTNRRKKGSKEQEAAINSLAVDGYRGWSDHYDTIVGKLRMHVTIDGEEKDVSAGQALNLLNHPDRAVRQAVFKEYTRVWQEESRLFSDTLNHLSGFRLATYDIRKWDNILDEPLAINRLDEQTLKSMWNVIQTNKPTFVRFLDRKAKLLGLEKLSFYDVESPLVFSSKPKKYTYQEGAEFIIEQFNKFSPKMANFAQSAFEKGWIEAEDRDNKRPGGFCTDFPVEKESRIFMTYDGAPGTVATLAHELGHAFHSHVIRDEPFENTDYAMNVAETASTFAEMIIADASVKDAKTKEEKITLLEDKIGRSIAFFMNIHARFIFECNFYEARKQGVVSVDRLNSLMEEAQREAYLDALDEYHPQFWASKLHFYIADVPFYNFPYTFGYLFSLGIYHKAQAEGASYEDKYIALLQDTGSMTTEQLAEKHLGVDLRKADFWEEAVALAAKDVEDFLTLTEEYVK

SEQ ID NO: 1715 - protein, 173 aa, Listeria monocytogenes
VLKQFSPDKMLNTPFGITAAQLRKMGKTTILTDLDNTLLAWDQLDATDEVINWFTILKEEGIKVMIFSNNNEERVARVAKAIDVPYLARAKKPLGANFRWALKEMDATPEETVMIGDQIMTDIFGGNRQKLTTIFVRPVKQTDGMATKLNRMMESVILKRLAKKNQIKWEESL

SEQ ID NO: 1716 - protein, 366 aa, Listeria monocytogenes
LTEEVRCIGCGAVIQTEDPDKIGYAPKSSLNNEQVICKRCFRLKHYNEIQDVALTDDDFLRILNQISSKQALIVYVVDIFDFDGSWLPGLPRFAGSNPVLLVGNKEDVLPKSLKRDKLTRWMRTRAKEQGLAATDVVLVSAEKGHGFDTLLEKIDELRNGQDVYVVGCTNVGKSTLINRIIKQASGENNVITTSQFPGTTLDKIEIPLADGNVLVDTPGIINHHQMAHFIDTTTLKAITPKKEVKPAVFQLNEEQTLFLGALARLDYVSGGRKSLVVYVSNNLPIHRTKLEKAEALYEKQAGLVLQPPTEEDMKTLPKLVPYSFTVKEKADIVFSGLGWVTIPEGGAKVTAWVPEGVSATIRTSLV

SEQ ID NO: 1717 - protein, 273 aa, Listeria monocytogenes
LEKYVVIGNPIRHSLSPAMQNRIFQELGMNAEYNSVLIEEDAFETEIKKLMDSGVRGFNITTPFKERILPFLDELDNLAAASGAVNTVLKKEDKWYGFNTDGKGYLEGLEEIRSITEDDSILITGAGGASKAIYLALSTHTDAKITVANRTTEKAIEMTKDNNNHHAITLEEAEKQLADFTIIIQTTSIGLEASKNKSPISLANVKQGTICSDIIYNPAETAFLKEAKKNGAITQNGLPMFVNQGALAFEIWTGIKPERSLMKEAVLEQLGGN

SEQ ID NO: 1718 - protein, 272 aa, Listeria monocytogenes
MSDLFLELNGKVHSLSETFPGLSVQEVSRQSPQLSMETAEIAGTDGVIPGMTQFKPFIFSAKCNLQALDIPDYHLAVREIYEFLFQRDSYYIWSDQMPGIRYEVHPKPVDFSRESDRVGLLTIEFDVFKGYAESRGTSLDPMTFEVDLWQMGMNLSNRDDLFYIFKENTFRVYNAGSDRVNPLMRHELDIAMTANGTPTIHNLTTGESFEYQKELRKTDVLLLNNIYPLVNNRRVGKDTNHGIITLEKGWNDFEIKGVTDVTIAFNFPFIYR

SEQ ID NO: 1719 - protein, 96 aa, Listeria monocytogenes
MLTATQKRFLRKEAHNIQPIFQVGKGSVSPNLIIHVKEALEARELIKISILQNCEEDKQTVAEKISARSGAEIVQVIGRTIILYKTSVNKQQIKLP

SEQ ID NO: 1720 - protein, 188 aa, Listeria monocytogenes
MKHKVGILGGTFDPPHLAHLHMAEEAKKQLELEKILFLPNKIPPHKHISGMASINERVEMLQLMIEGIDSFEIDTRELMRTGKSYTYDTMRDMIIEQPDTDFYFIIGGDMVEYLPKWYHIDDLVKMVTFVGVNRPLYQPEVPYDVVKIDMPKTTISSTEIRNDIEHAEAFLPEKVWSYIKEHQLYGKK

SEQ ID NO: 1721 - protein, 191 aa, Listeria monocytogenes
MERNEVLKKVEAAMPNARFKHTLGVEKAAVELAEHYHMDVEKARITALLHDYAKYYDDDKARKIIEDEGYDPRLLSFHHSLWHAPVGAYLAEKEFGITDTEILEAIRLHTTGSATMSDFDKLIYLADYTEQGRTFPGVYKARRLALKSLDEAMLFALSNTITHLVKKQQLVFPDTLDAYNYFVNLNLEGDY

SEQ ID NO: 1722 - protein, 118 aa, Listeria monocytogenes
LNSYDTLMLTAKAADDKRAEDILALDMKGLSSFADYFVICHGNSDKQVQAIAREIKEKALENQVDVKRLEGFDAAQWILIDLGDVIIHVFHKEERSYYNLEKLWGDAPLVDVSAAFIS

SEQ ID NO: 1723 - protein, 243 aa, Listeria monocytogenes
MSYEYFPGFYDRLMDSELYDEWLEFSADFIGDAPKKVLDLACGTAEFALRLSFSGHQVTGVDLSKEMVAVAKEKVAAAEIDLPIIEQDMSKLALKQTFDVVTCFCDSLNYLETEQALEATIQAVSAHLEPNGLFLFDVHSVFKIEQGFKDYSYGDSDEEISTIWNSFPGEHPHSIEHELTFYILGEDDTYNRVDELHKERTYPIATYENLLKKFGFTKIDIYADFSHEKPNKTSERIFFAARK

SEQ ID NO: 1724 - protein, 200 aa, Listeria monocytogenes
MVELVKKYKNYILIGIAILCAGLVYIWIPDGKTDTVTANPTATKEEKPGKEEVKLPNYVYIDIKGAIRTPGVYKLPVNARVQDVVKTAGGLTDEADSGKLNLAEKLKDEMSIYVYKKGEEGPTLQGASAEETTSNLEKTNINSANKADLQQVPGIGESKATAIIEYREKEGLFQTIEDLKNVSGIGEKTVEKLKEYLDVN

SEQ ID NO: 1725 - protein, 186 aa, Listeria monocytogenes
VQRIAWDQFFMAQSHLISSRSTCTRLMVGATIVRDKRIIAGGYNGSIAGGDHCAEHGCYVVDGHCIRTIHAEMNAILQCAKFGATTDKAELYVTHFPCLACTKSIIQAGIKKVYFAKDYKNHPYALELFNIAGVELQKVEFDESVLQVNNWNGEKMHTLVKEAAVEVNIDPEKAEQLYQSISEKLN

SEQ ID NO: 1726 - protein, 740 aa, Listeria monocytogenes
MLVLAIICANFTSSIVPICICLLGLIAFIKKSKIILLFVLIYLLTYSFLFVVEKFNISSFTATEYSGNCQIIDNLKIDGDSFQAFVRCEKEKFQLSYKITTEEEQQKLKKLHYGQFISVYANVETPSIHRNQNQFNYQTYLKNQNVHYILRASNLAISEHFSPSFLMRLQNIRLKIITHLTEKISPTISPYCLALISGEKSGFSPEMYEVYQQMGVVHLLAISGLHVNLLIGAIYFLLLKFGVTRERAITFLLVFLPFYVILTGANPPVIRAATMTALLLLSEKYTTKWSSFSAICLSFILFFLLQPYVMKEVGFQLSYTVSFGIILSSRQILAQQQNAFTKSLSISFISTIMSSVVMMYHFYSFSWVGIFFNLIYVPIFTIIILPGCLTVFVLSFFSAEIFHFPEVVLTFFIQLVEKLTYIFAKIPHQTIVTGRPNILILMLIIITIIIFFNQWQKKKFPFGILICFCFLCYFSSFNFSGKVSFIDVGQGDSILIQLPYNQGNYLIDTGGQLPFEKEAWAKKRKPFTIGESTLTPVLKSKGINSLDKVIITHSDADHMEGLDDLQKNITINELIYAKGAENKPIMKEALAAMPKVKQTIILAGAKWQIGENSFECLYPDKAGEGGNDDSIVLKAVLDDKVWLFTGDLEANGEMGISEQPIKADILKVGHHGSKTSSSKEFIQKVKPTFAVISCGLNNRFGHPHEETINTLETAGVTILRTDVQGEIIYTFGKGFEATLK

SEQ ID NO: 1727 - protein, 430 aa, Listeria monocytogenes
MTDKIFQEKVGPVALTIVPTQKYKSNKIVFKFRAPLERETVTKRALLSILLETNSEKYPTQTDFRKQLANLYGANFYTTTAKKGNEHVLTVIFDMIDGQYVSDGNHILEDAFAFMEQALFRPNVANDAFNEETLTREKENLKSSLEGIYDDKIRFASKRLVEEMFRDDEFRFGSAGVLEDIDAITAKDLYEYYLQFIAEDTIEIFICGDVTKEEVMPLIEKMAFSPRPERKGIFYTKEAPKEVRVIHEQQAINQGKLVLGYQTETLFGDDDFVALQLANGLLGGFANSKIFINVREKASLAYYASSRIDSFKGYMIISAGIDEVNYEQALKIIEEQVVAMKQGNFTDDELNQTKEMLINQLLETNDQAQGLIELVYNNVLRDANLDLENWIAKIKQATKEEVVAAINKIKPDTIYFLSKGGEELHGKNHI

SEQ ID NO: 1728 - protein, 316 aa, Listeria monocytogenes
MTAILATIVSSTLLMAGPLIFTALGGVYSERGGVVNIGLEGMMVMGAFSAIVFNLTFQDTFGNLTPWISLIAAMVVGGLFSLVHAVATINFRADHVISGVAINFLATGLSLFLVKVIYDKGQTDQIKYYFGKPDIPVLSDIPVIGDIFFKNIPVMSYVAIIFAIVSWFIIYKTRFGLRLRSVGEHPLAADTMGIKVRWMRYQGVIISGILGGLGGAVYAQSFTLDFGHATISGQGYMALAAMIFGKWNPLGAMGAAIFFGFAQCLAITGGSLPFFKDIPDVYLQIAPYVLTILALVGFIGKSEAPKADGVNYIKGK

SEQ ID NO: 1729 - protein, 350 aa, Listeria monocytogenes
MSKRLQALVIPVTAVILGLICGAIIMLIFGYDPIAGYSALIEGVIGENFYIGETIRQATPYILVGLSVAVAFKAGLFNIGAEGQMLMGWLGSIIIAVNFDGLTKWIHLPLAIITGMVFGALWAFIPGILKATLRVNEVIVTIMLNYTALYIFNYVVQNLLTDGLDKTQEIHASASLQSELLQSLTDYSSLHWGILIALGFALIIWLMLNKTTFGYEIEAVGFNENASQYAGMSVKKTIIFSMVIAGALAGLGGVMEGLGTYGTAYVLTSSPGIGFDGIAVALLGGSSPIGIVFSAILFGALKVGALNMPAVAGVPNELVNVIIALIIFFVASSYIIRWAMAKFKKGAKAE

SEQ ID NO: 1730 - protein, 513 aa, Listeria monocytogenes
VDFVIEMLGIRKEFSGFVANDNITLQLKQGEIHALLGENGAGKSTLMNVLFGLYEPDGGEIRVRGTKENINSPNKANELGIGMVHQHFMLVDKFTVAENIILGKEPSKLGVIEKKKAIEEIKEISDRYGLRVDPNAIVRDISIGMQQRVEILKTLYRGADILIFDEPTAVLTPQEIKELIQIMRSLIKEGKSIILITHKLKEIMDVCDRVTVIRRGKGMGTVNVPETTPQDLANLMVGREVVFTTEKIDANPGKDVLEVKDLVVKESRGVESVRGLNLTVRAGEIVGIAGVDGNGQSELISAIAGLSKVTSGSILLNGEHIENKKPRKITEAGLGHIPEDRHKHGLVLEMSLGENIALQTYYKKPISSKGFLNHKAMYDFARELIEEYDVRASSEYVAAKSLSGGNQQKAIIAREIHRNPDFLIAAQPTRGLDVGAIEFIHRRLIEQRDNGKAVLLMSFELDEIMNVSDRIAVIYEGKIVAIVDPKETTEQELGLMMAGSSKQEAEMGEKEHV

SEQ ID NO: 1731 - protein, 357 aa, Listeria monocytogenes
VKKRTFALALSMIIASGVILGACGSSSDDKKSSDDKSSKDFTVAMVTDTGGVDDRSFNQSAWEGLQKFGKANDMEKGTDGYNYLQSASEADYKTNLNTAVRSDYDLIYGIGYKLKDAIEEVSKQKPKNQFAIVDDTIDDRDNVVSIGFKDNDGSYLVGVVAGLTTKTNKVGFVGGVKGTVIDRFEAGFTAGVKAVNPNAQIDVQYANDFAKADKGQQIASSMYSSGVDVIFHAAGGTGNGVFAEAKNLKKKDPSRAVWVIGVDRDQWDEGKVTANDGKDYNVTLTSEIKRVDIAVEDLATRAKAGDFPGGTKIEYGLDKDAVGLSEHQDNISKDVLAKVEEYKQKIVDGDIKVPEKP

SEQ ID NO: 1732 - protein, 279 aa, Listeria monocytogenes
MAKIGFIGFGSMASLIATKIIETEVATPEEIILYSNSKNEHFNQFYTKYPTAELADNEAEIFTKADHSFVCKLPLAVLPLMKDCAAVLTPDRHVVSIAAGVSTSDIIEITPGLQVSKLIPSLTTAVNVGTTLIAHAETVNQTNTSWLETTFEHFGHVMTIREENMDIASDLTSSSPGIIAAIFEQFVEAALRRSSLSDAEVFQMINFALAGTSKLLVEEDYTFSGLIQRVATKDGTTAEGVELSKAQLPNFFDELLDRTQNKYASSEKEIQAQKRELLS

SEQ ID NO: 1733 - protein, 757 aa, Listeria monocytogenes
MATQKKKTSGRKKSSTRSKKKQSASFRLEITGVILIAIGVIGLLQLGFVGRGFFALAEMFVGLLSYVLLAGSVILGGYMVIRRKMPHLFSKRLVGIYLIVLGFLTYIHMYFIIHNLGANASVVSSTWKLVLENLFRPNQVGFVGGGMIGAAITSITYFLLDRLGTNLIAVLLIIYGFSLVSGISIRQFFSKIAEFVRYLFTKGKVATEKGKEVKAKRDKKKAEKIVDVEPDEVIDVIEPLQEEKTPPIISNFSSKVEQEKAPVEEKISQKEQDLEMFQQESFENEIYQLPPVDILAPAKVTDQSKEYDQIKVNAKKLEDTFESFGVKAKITQVHLGPAVTKYEVQPSVGVKVSKIVSLSDDIALALAAKDIRIEAPIPGKSAIGIEVANQNVAMVSLREVLENNPKNNPDEKLQIALGRDISGEAMMANLDKMPHLLVAGATGSGKSVCINGIITSILLRAKPHEVKMMMIDPKMVELNVYNGIPHLLAPVVTNPKKAAQALQKVVAEMERRYDLFSHTGTRNMQGYNDYVKKHNELNEEKQPELPFIVVIVDELADLMMVASNDVEDAITRLAQMARAAGIHLIIATQRPSVDVITGVIKANIPSRIAFAVSSSIDSRTILDMGGAEKLLGRGDMLLLPVGSSKPTRIQGAFLSDAEVEDVVNYVISQQKAQYSEEMIPDDIPEVEGEVTDELYHEAVELVVEMQTASVSMLQRKFRIGYNRAARLIDEMEQRGVVGPHEGSKPRRVNVEVSPEHE

SEQ ID NO: 1734 - protein, 137 aa, Listeria monocytogenes
MSFAVPYLVFNGEGQDALTFYADVFQAKITSVQRFKEMNNFDGDAVFGERLMHSRLAKNGEEFIYITDAPYDGFTIGNRVTILINFETEDDIKYAYEVLSATGKVEMELQVAFWGSTYAQVTDRFGVFWQLNFDKKS

SEQ ID NO: 1735 - protein, 168 aa, Listeria monocytogenes
MIKLCTISDSQALLEVSYKTFDETFRAQNKPENMDAYLKTNFTAKKLSDELKNPHSYFYFVFHQEAIAGYLKLNIGDAQTEEIAGNTIEIERIYVLKSFQKKGLGKELFNQAIEIAKEVDAKKIWLGVWEKNKNAIQFYAKLGFIKNGQHDFFMGDDCQTDIIMIKDL

SEQ ID NO: 1736 - protein, 150 aa, Listeria monocytogenes
MKDILRDIGVIARALDSISNIEFKELNLAKGQFIYLVRICENQGIIQEKLVDILKIDRTTASRAIKNLEKNGLIIKKQNKNNKKNKLLFPTEKGQQLYPLIIRENEYSNAVALKGFTEAEINMLTDALKKVKENIADDWLYVKKGNKRSY

SEQ ID NO: 1737 - protein, 309 aa, Listeria monocytogenes
MSITNLLNIKYPIIQGAMAQIAKAPLVAAVSNAGGLGIIASGGMTADMLREEIQKTKALTDKAFGVNLMLMMTNIAELTEVIIEEKVGIVTTGAGTPKTFMPIWKEAGIIVIPVVPSVMIAKRMEKMGADAVIAEGTEAGGHVGETTTMALLPQIVDAVTIPVIGAGGIADGRGIVAALALGAKGVQIGTRFLATDECPVHPDFKAAVIKASDRDTMVTGRKAGAPVRSIKNKMIKEYIRLEEENADRDTLEELTLGSLRKAVQEGDTDNGSVMAGQIAGLITEIKPCKDVIEEMMTDAKKVIAGLELK

SEQ ID NO: 1738 - protein, 622 aa, Listeria monocytogenes
MADSKSFTFELNESVLTAQVGRLDEMAMVVEQRFSELKMTIEDVGNADPGSKISESLGGLQSGLGTISSAFGQLGSSSEAITSGFGTAVGSVGGITDAFKNLGSSVQNGTLFSSLATGIGGMSTMLGGVSGGVQGITNLASGFMELKNHLGGLMSSIGGVGGIMGKLTSPMGLVIIGIVALVAAFAYLMTTNESFRNTVMSVVTQVAQLFGQLVASLMPIIMQIVTAVMQIGAALMPMVMQFISFFAQLLAQLMPFINMLISMLMPVIMQIVQVVMSLVSALLPSIMTVIQGIMSVIQFLIPIIMQIATVVVQIVVTIISYISKIMPIVMTIIGVIVSIITTIISYVVIIATTIASVIGKIISFIASVITAVIGIVQPIIAFITNIFTTIVTIIGAAFQMVFTVASKIWNSIMSTISGIIDGIKAVITGISTTVSSVFNGVKRIITGVFDGIKSAWGGLTDFVGNIFDGVSSAIQTVVDNVKGFVNVVIRGINGAIGLINKIPGVEIGKIPQLISGTTNFQGGFARMNEGGRGEMVVLPSGSQVIPHDATMKYARESARGNKSMLYTSQGADLARVENLLERLLQKNPVIKMDDKVVAEVVSRNQANSFDQYNYTMGGAAYS

SEQ ID NO: 1739 - protein, 290 aa, Listeria monocytogenes
MVYGAIEAGGTKFVVAIGEKSGKIIKRESYPTTEPAETMKAVIQFFKQYEDELKAIGIGSFGPIDIRKSSATYGYITQTPKLAWRNYDIVGAMKKEFNVPIGFTTDVNAAALGEVSLGAAAGLDSCIYLTIGTGIGGGAVVSGKILEGFSHPEMGHIMVRRHKRDRFTGSCPSHSDCLEGLAAGGAIEKRWGQKAAELADNEEVWNLEAHYIAQALMNYTLILSPERIVLGGGVMKQRQLFPLVRQKLKALVNNYVQLPDLDEYIVPPKLEDDAGITGCVLLAVDAEESN

SEQ ID NO: 1740 - protein, 180 aa, Listeria monocytogenes
MYEKARQMMIEAHSGQVRKITGEPYFSHPLNVARILRRAGFREEVVVAGLLHDAVEDTEMTDADIRATFGDEVADLVASHTENKTLSWEERKAHTIEQVRTGNLEEKALIVADKLDNLTSVKYALSSEGKSVWSYFKRGYDLQKWYNQGIKNNMEYGLNPSEIPPFFDEYARLVKWIFKK

SEQ ID NO: 1741 - protein, 233 aa, Listeria monocytogenes
MTKEKVLWGYDEKTGPEMWGHICSDFEIAHTGKAQSPVDIEQADVVKLKPSTMKFYYKETDYTIRRIEQSVHVFPHDKEQGLRFNGEYYPLVSFHAHIPAEHLLDGYIYPIEWHFVHEKPDGTTLVMSAWMDIDNTNNIEFKNLPTYFPEVFADFETEREITLDVNEFMPEERVFYTYQGSRTTPPTVEGVTWIVLKNAKTLGQEDFTEFEKAIGNTSRPVQDLNGREITFYN

SEQ ID NO: 1742 - protein, 357 aa, Listeria monocytogenes
MKQLLKIFVPVIVVALLMMLLATTMNRSEGYAGSNTLTIYNWGDYIDPSLITKFEKETGIKVIYQTFDSNEAMMTKIEQGGTTFDIAVPSDYAISKMKEENLLIPLDHSKLPNEKYLDPRFMDLSFDDDNKYSMPYFWGTLGIIYNKEMFPDKNFDTWNALFDPELKNQILLIDGAREVMGLGLNSLGYSLNDTNKAHLQAARDKLETMTPNVKAIVGDEIKLLMADNEAGVAVTFSGEAAEMLSENEDLEYVIPKDGSNLWFDNMVIPKTAKNVDGAHKFINFMLKPENAAINAEYVGYATPNAKAVELLPKEISSDERFYPDMDELNNLEVYDNLGKRMLSYYNELFLEFKMYRK

SEQ ID NO: 1743 - protein, 268 aa, Listeria monocytogenes
MKKSKWGTIYLVLVFVILYAPIFYLIFYSFNKGGTMHNFSGFTLGYYKEVFQDTRLLIIVLNTFVIALLSSVIATIIGVCGALAIKFMPKPFAKNSLLSLNNVLIVSPDVIIGASFLIFFTILGVKLGFISVLVSHIAFSIPIVVLMILPKLQEMSPTLMDAARDLGASQWQVLSKVILPYIMPGVLAGFFMALTYSLDDFAVTFFVTGNGFSTLAVEIYSRARQGISLSINALSTLIFLFTIILVIGYYFINQRNTSKNIRTGATKE

SEQ ID NO: 1744 - protein, 269 aa, Listeria monocytogenes
MNRRTRTVYLVPYVLWILLFVVAPILLIVYYSFFDVDGNFTVDNYIHFFTPVYLKMTASSFWYAFLITVFTLLISYPTAYLLTKLKHKQLWLLLIILPTWINLLLKAYAFIGIFGTYGAANQFLEILGIGSKQILFTDFSFLFVSTYIFIPFMILPIFNAIEEINPTLIQASRDLGASSLTTFRRVIFPLTADGVKSGCQAVFIPALSLFMITRLIAGNRVITLGTAIEEHFLVTQDWGMGSTIGVFLIIAMILIMFLTGSKKKRGARK

SEQ ID NO: 1745 - protein, 364 aa, Listeria monocytogenes
VTETIIRFENVTKQFDNDPPVLDNVSFEIEKGKFYTLLGPSGCGKTTILRLIAGFLEASKGQIYLGDKVINQIPANKRPVNTVFQDYALFPHLNVYENVAFGLRIKKLKKEAIDEKVKEALRFVNLKGYEKREISEMSGGQRQRVAIARAIVNEPEVILLDEPLSALDLKLRTEMQYELRDLQKRLGITFIFVTHDQEEALAMSDEIFVLNKGEIQQSGTPIDIYDEPINKFVADFIGESNIVNGKMIQDFEVEFVERRFECVDQGFRPNEVVEVVIRPEDLEITSAEKGQLQVTVDWMLFRGVHYEVGCIDIDGNEWLVHTTRKVRVGDKIGLAFEPEAIHVMRLGETEEEFDKRLDSYDEVQ

SEQ ID NO: 1746 - protein, 180 aa, Listeria monocytogenes
MEIGKRIKNLRLSKNLTQEELGERTDLTKGYISQLERDLSSPSIETLFAILEVLGSTPKDFFDEEEHNQKVIYGELEHTFFEDEEKGYRIKWLVPESNEKEMEPVLLEIEANSCFKSFEPSLSETFAYVLKGEVTVLLGRNEYVAKKGEAIYFHAADEHQIINRSSEHATLILVATESYL

SEQ ID NO: 1747 - protein, 317 aa, Listeria monocytogenes
LRKRYLIALTTLFSVLLILTGCSDESDTKATSSDQLTVYTTVYPLQYLTEQIGGKYVDVHSIYPPGSDAHSFEPTQKDMMKIADSDLFFYIGLGMEGFVDKAKKTLANEHVTFVPTAEKLDLPKDPDAAEEHDHESEEEHEHGDINPHVWLNPVYMEQMATVVKDKLIKEMPNQKETFEKNYQAVEEKLKNLDQDFRTVTSEAKQKDFVTAHAAYSYWETEYGLHQIPIAGVSTSDEPSQKKLKSIVEKIEAEKIPYIMLEQNTNSKIADVIQQETNTKTLTLHNLETLTQKDIEQKRDYFSIMNDNLKALKEGLNY

SEQ ID NO: 1748 - protein, 469 aa, Listeria monocytogenes
MDMTNWLQKRVRLSPKETALVFEGKEETFEEISEAVERLAGKLFALGIRKDEMIALLGKNDRMTFLLIHALQQLGAVTLFLNNRLTKKEIAYQLANAEVKQVIVADTFEDKVGAGISYSELAETDYKEPELLETWDLSRTASIMYTSGTTGKPKGVIQTYENHWWSAVASVLNLGLTEKDSWLCAVPIFHISGLSIMMRSVIYGIPVYLEEHFDEEKITQLLESGKVSTISVVTSMLERLLKIHGGSYHPNVRTILLGGGPASKTVLEICKQRDIPLVQSFGMTETASQIVTLPPKDALNKIGSSGKALFPAEVKIADDGEILLKGPSITPGYLHNKKATEASFVDGWFKTGDIGYLDEEGFLFVVERRSDLIISGGENIYPTEIEHVIGEYVAVKEVAVIGQPDDKWGSVPVAFIVAEETFDEDELQLICQTNLASYKIPKQIIIVEKLPKTASGKIQRNKLKERHSK

SEQ ID NO: 1749 - protein, 272 aa, Listeria monocytogenes
MSFNWQTEKVYEEIKYESYEGIAKITINRPEVHNAFTPKTVTEMIDAFNLARDNSNLGVIILTGEGEKAFCSGGDQKVRGHGGYVGDDQIPRLNVLDLQRLIRVIPKPVIAMVAGWSIGGGNVLQLVCDLTIAADNAKFGQTGPNVGSFDAGYGSGYLARVIGHKKAKEVWFMCRQYTADEALEMGWINTVVPVADLEKETVAWAKEMLQKSPTALRFIKAAFNADTDGLAGIQQLAGDATLLYYTTDEAKEGRDAFKEKRDPDFDQFPKFP

SEQ ID NO: 1750 - protein, 275 aa, Listeria monocytogenes
MLVNGQHYHLTAAISGEKPALLMLHGFTGTSETFQDSISGLKKRFNIIAPDLLGHGNTASPEEISSYTMENICEDLAGILHQLNVSRCFVLGYSMGGRVATAFAATFPKRVRGLILVSSSPGLEQEDIRASRVEADNRLADWIEEEGLVPFVDYWENLALFASQKVLSPEMKRRIRSERLSQNSHGLAMSLRGMGTGKQPSYWNCLANFTFPVLLITGALDEKFEKIAQEMHQLLPNSTHVSIQEAGHAVYLEQPNSFSSQLNYWLEDILKEEEK

SEQ ID NO: 1751 - protein, 580 aa, Listeria monocytogenes
MTNHEQVLTDYLAAFIEELVQAGVKEAIISPGSRSTPLALMMAEHPILKIYVDVDERSAGFFALGLAKASKRPVVLLCTSGTAAANYFPAVAEANLSQIPLIVLTADRPHELRNVGAPQAMDQLHLYGSHVKDFTDMALPENSEEMLRYAKWHGSRAVDIAMKTPRGPVHLNFPLREPLVPILEPSPFTATGKKHHHVHIYYTHEVLDDSSIQKMVTECTGKKGVFVVGPIDKKELEQPMVDLAKKLGWPILADPLSGLRSYGALDEVVIDQYDAFLKEAEIMDKLTPEVVIRFGSMPVSKPLKNWLEQLSDIRFYVVDPGAAWKDPIKAVTDMIHCDERFLLDIMQQNMPDDAKDAAWLSRWTSYNKVAREIVLAEMANTTILEEGKIVAELRRLLPEKAGLFIGNSMPIRDVDTYFSQIDKKIKMLANRGANGIDGVVSSALGASVVFQPMFLLIGDLSFYHDMNGLLMAKKYKMNLTIVIVNNDGGGIFSFLPQANEPKYFESLFGTSTELDFRFAAAFYDADYHETQSVDELEEAIDKASYHKGLDIIEVKTNRHENKANHQALWAKIADALKALN

SEQ ID NO: 1752 - protein, 134 aa, Listeria monocytogenes
VDSEMNHDFDLEKQFAFFVVNFRMSKHDFEELTEVEKNFIMKEWENKVIFESTMLRNAVLNAEQNLNRKRNSRFIDLHKKRQKKADVNYTVNALQAISENEAKEGKAWIDRIYGANGLRRPKNKEERRNVNGGF

SEQ ID NO: 1753 - protein, 462 aa, Listeria monocytogenes
MNTKLPLDLFNQAKRSASQDQPALFSWVTELDELVSPVKLFKKAGTAFKGERFFWQNPEMTLTMTGFGVTKQFLAEKKKDAFLGLQEKIEKRLRTSVTNATVDATGPVYFGGFAFDPERDTEKEWQSFKDGLFYLPLFMLTNKDGKSYLTVNLSIYSDDTESKLEAVFNQWQKIIHQEVNEAEMALLTDFKEIGKDHFLETASEIIDMINHSEDVKKVVLARRMGLRFQRQVDSAIILENMLATQENSYFFLIEKGTGVFFGATPERLLAVNGDEIHSSCVAGSTERGATEEADEALGNALLKDAKNLREHSYVVQMMEETLKPFTTGLSLSSQPVLLKNRDIQHLYMNITAKKKPDVSMLEMVKALHPTPALGGLPQKMGLAIIRMKEEMDRGFYGAPIGWVDLKGSGEFAVAIRSGLIVDSQGLIYAGCGIVGDSVPKEELQETAVKFQPMLRVLGGIKK

SEQ ID NO: 1754 - protein, 907 aa, Listeria monocytogenes
MRITSIDIIGYGKWSDAHFNNIANFQVFYGENEAGKSTIMAFIHSILFGFPTKQQSIPRMEPKNGGPYGGRLTLEDTSFGKVIIERLKGKATGDVRIYYGDGQTAGEEKLPEIIGEIDRNTYEAIFSFDIHGLQNIHQWKKKEFERYLLATGTTGSDALLKTAETLQKKLDSLYKPSGRNPLINQQLKRVKEAQQAFQNAKKQNAQYEELINEKEQATARQAELQIEKTTKRVELDTLETLGDLWPLYQEWKALSNKASQKKEATFPPDGIIRLEHLQLREKEWQNQLIQLEERKKNLISNNDYEHSAFFAKNEAEITYLIETYAAFGEREIQLKNLKQEINFHQVDSKQTFRVWTSELEQTMARLKEKEQFHKEQQHEIQLKLKLTNDTEEKLQKKIDQIEMDMWDNRTFQQAKEKMQQKPKTFRTKTFVSFGVFAVALSLMIVFQSIWSVALVFVSALIVGYAIMTTWKALPTNNEQLLVFLEQKKIRQEWQQLLNEMDIIASQIAELRATENKLNETIYQHTMELKQLFSDLGIKHNPDANWAYELAVYKKNSEKAQLAMELISKLEPLAEKQEVYKARLANLELPGKYTDTEEKITFLRQGLLYYRNHLTENAKLAEKLEQVTMQLDLVKQDLLLIKKEKADLLASANAKNEEEFRMAAIRVKEEQNWRERLVLIEAQLEPEKRIALNQYENQATIKEKELQLEETLRQIELEQEKIHASLAAQNHAIHKLEEGGTFAVLMQEFYSEKSKLQQIAAEWTETKLALQILQDTMQRLQEGKLPKTLKLASEYFNHLTNGNYDKVYLQDNRLQVESKNVVPFFPEELSQATKEQLYLAIRFALIDVIHKDFPLPIIIDDGFVHFDSARMGQMMQLLRKRKSENQVIFFTCHQETRKYFSSEDIRML

SEQ ID NO: 1755 - protein, 411 aa, Listeria monocytogenes
MKEIKFLHMADLHLDSPFIGLSTLPQPLFSAIQESTFQSLERITTVAIKEAVDFVLIAGDIYDSEDQSVRAQARFAKEMKRLEVANIPVFMIHGNHDFIEKHKEKLALPSNVHVFSEQVEVMLHKTATGVSVNIYGFSYNERHIRSSRIDEYKVQGDADFHIALLHGSEVSSSEEHDVYAPFRVQEISKKGFDYWALGHIHKRQLLAESPSIYYPGNIQGRNRKESGEKGASIINLSEASTTIDFIGTSPIIWEEIIIPLPKNSEINAFYREITNVLESYQGRSHSYFLHIIIQMASSQKINTNDWLQMLQEEVELSNTTFVWVHKLTTEITNRSNLQTWYESHLAGEEIRRSFEQLQDESAFYQSVEALYLESGANRYLDDLSEQERERLLENALMELGMTLAEVEGDEK

SEQ ID NO: 1756 - protein, 117 aa, Listeria monocytogenes
MAVNIYDLAHDLDKGIRETPEFISLQDAYREVNENADAKAKFERFRDVQVTIQEKQMTGQEIDDETVDVAQQVAQEVQENELIVKLMEKEQAMSTIINDLNRIIMTPLQDLYNVAND

SEQ ID NO: 1757 - protein, 377 aa, Listeria monocytogenes
MSVLFTILLMAVIGGFIGAMTNYIAIRMLFRPYKAIYLFNKRLPFTPGLIPKRRDELAEHIGKVVVSHLLTEDAIRARLLDENLQKEITDTITKMFHEKMKLETTPNELLHHFGYENAEIRSMAWIEKTLEKEINHFLSTKKTTKMSDLIPTMLESELTTKLPHVTERITSKMTLFVASEEGKIQIKQMLQKFFEEHGKMGSMARMFINIDSFSEKIQQEGLKLIGQEDTKNLINQLLTTEWKNFEAKELQELIPTEKQAHLAGQLTSELIQTLPHEKLFNQPIQVILRGYEAAITEKVIPFAVERMLDFVATHSAEIVERMDLAKLVETQIATFSLPEIEKLVVEISGRELKMITYLGGILGGFIGIIQGILAMWI

SEQ ID NO: 1758 - protein, 455 aa, Listeria monocytogenes
MERIERDTLGEISVDATKYWGAQTERSKRNFAIGDNPMPIEIIYAFAQLKKATAKVNAAEGKLAEEKAIAIGQVCDQIIQGELDEHFPLVVWQTGSGTQSNMNVNEVIAHVANLTLGEGQIHPNDDVNMSQSSNDTFPTAMHIAAYGALVTKLLPEITKMEAVLTEKKNKYMHLVKIGRTHLQDATPLTLGQEISGWEACLTNNKNYLETSMKAILPLAIGGTAVGTGLNASRDFGDKVAEELMKQTGYPFTSDSNKYFALTSHSPINFVHGAIRSLASDLMKIANDIRLLASGPRSGIGELEIPANEPGSSIMPGKVNPTQCEAITMVAAQVMGNDVTINVAASQGNFELNVYKPVIIFNFLESIKLLADSMRSFRVHCLEGLTANEKVIETKVNDSLMLVTALNPHIGYEKAAKIAKLAFDENTTLKEAAIKTGFVTEKEFDLWINPLKMTNL

SEQ ID NO: 1759 - protein, 264 aa, Listeria monocytogenes
MTHFNALLAKEWLEQRRSLKIIWLPIVFALLGLTQPLMMYFLPEILKAVGTGAETEQVVALMGNQSAQEVMAQTLGSQFDQIGIIIIIVVAMACIQNDRTRGMLAFIMTRPVSAVEYVLSKWVMQCVVGLSSLLIGYVLAAYYTYFLFGELAINSLVEGFFVYAVWFIFVISLVVFASSIFDSNAVVAMISVFIAIVLGLISGLGGWIQIFNPAYLSKNATMLIMSGKTMDYFIPTILITAAWIILLVGLTVLMIKIKALPKTE

SEQ ID NO: 1760 - protein, 301 aa, Listeria monocytogenes
MKKLEIQGLKKKYNGKWVIKGIDLTINEKECVALIGPNGAGKSTMINMIVQILTQDEGQITLDGESAKLVREKIGFLPQYPEFYGWMSATECLHFMGKLSNMEKTDLKARINEVLLLVGLEESANKKISTYSGGMRQRLGIAQAILHRPELLVLDEPVSALDPIGRREMMLLLDKLKKEITILFSTHILKDAEEICDRIAIIKNGELVADKTVVQLMEEESSPVFDVEFNGNSEAWQTLLLQNKYVEKIEKVGMVYQVYTTNQKAGSEAVLSSLLQIDGEFIRVENRHQSLEEIFMEKVGK

SEQ ID NO: 1761 - protein, 714 aa, Listeria monocytogenes
MDKFKQQLIKYLKLFFGFIGKWLNKGWQKFRRFWKNKHIGKIFLLAGLVFLLSFIIYLVIVAKSADIDALKKGLESATIIYDKDGDKAGELSSTDATFVSIDKISKNLQNAVVSIEDRKFYEHKGFDLKGIARAGVNLVTSGGISGGGSTITQQLAKNALLTQEQTFTRKAKEIFMAREIEKTYSKDEIMEMYLNRSYFGNGEWGVENASLKYFGKSAADLNIPEAATIAGLLQAPSAYDPYQHIDKATNRRNMVLNAMVETGTISKAEGDKYKATKIVLNDQSKDPLANKYPWYVDAVINEAVNEADITQDEIMQKGYKIYTELDQNYQTSLENVYNNDGLFPSNANDGTLVQSGAVLMDPATGGIRALVGGRGEHVFRGFNRATQMKAQPGSTMKPLAVYTPALQSGYDVDSMLKDEKITYKGNYTPTNVGGVYSGEVPMYKAVANSINAPAVWLLDQIGIDKGVKSVEKFGITVPEKDRTLGLALGGMSKGASPVEMATAYATFANNGAKPESHIITKIVDPSGNTVYENVPKTKQIISETVSNEMTSMLLDVINTGTGQSAAVSGHEMAGKTGSTQVPFDDTSGTKDQWFVGYTPNLVGAVWMGYDKTDKEHYLTTTSSAGVSSLAHYVMNSGLQYQKSADFSTKSAAQETAAKKEEEEKEKNSGSDFWSGVKEKADEAGETIKKGADKVKEFGGKVSDGIGNLIDSIGN

SEQ ID NO: 1762 - protein, 553 aa, Listeria monocytogenes
MFKHILLSLNGYKISYLRNDVISGVGVAALTIPVAMGYAQVAGLPPIYGLYASFLPVIAYVIFASSPQLIFGIDATASAITGSIILGTAGLAAGSKEAIALAPILAFFCAIFLVLFSVLKLGRFAKYISAPVLSGFISGLSVSIIMGQIPKIMGLKESGDSFFSSLGIIFGQFFQSNWISFAMGVVTVIIVITCKKVIPKIPMSLVVLVLGTMAAYFFKLDQYNVDIVGKIPVGFPSLALPDFGASSWALAIGGGLVCAIATFAGSLLPSESFAMRNKYTIDDNRELFAYGVSNFVAAFSGCSPASASVSRTAANEQFRGKTQMVSIVAATIIALIVAFLSGLLYYMPQPVLSGIVFAALVGIIDVDVLKGLFKVSRREATVWIVAALGTLLVGVIFGVLLGIFLSFINVVSRSMKTPIAILGVIEGRHGYFDLKRKSEAKPIPNVVIYRYSASLFFGNFNKFADGLKEAVQDDTKLVIFEASAIINIDTTATESMKDLLKWLDDKGIEYYFADLIDHLKTSFRKHDLGYLIDNGYTKKTVEDALDAYYAEHK

SEQ ID NO: 1763 - protein, 147 aa, Listeria monocytogenes
MYSNMKEKVVFTLIMCSLMILCMSSYNIFLENGIGTDSLMIILKAFVPFLFIGFLLDFFVVGKIANRLHALLVSEDASKFKKIIMMQLLMVTFMCVLMSTLSLIVNQGEWSHLGILILRNYFVALFLQIFIVSPFVRLISPRIFALL

SEQ ID NO: 1764 - protein, 250 aa, Listeria monocytogenes
MLFLDKNLELNDTELDIYNYIVANLDKVVYMRIRDLATEAHVSTTTILRFCRKFGCNGFSEFRVKLQLYLEEQKLAQIDMADETTYIDFLKRTAQPEFKAQIQNAVEILRDRELVLFAGVGSSGVIAEYGAIYFSSLFTLALHIEDPLNHPFYHLSSKLSDKICMIAISVEGENEDIIRYIHQLKAQNCKVISITNSAKSTIARLSDANIAYYINKEMYQEANITSQLPALYTIENIAREIRTQIDKEKM

SEQ ID NO: 1765 - protein, 438 aa, Listeria monocytogenes
MTKGIKIATIGGGSSYTPELIEGFIKRQDELPVRELWLVDVEAGREKLEIVGNLAKRMVEKAGVDMEVHLTLDREEALKDADFVTTQLRVGLLDARVKDERIPNSYGVVGQETNGPGGMFKGLRTIPVILDICKDMERLCPDAWLINFANPAGMVTEAVLRYSNQKKVVGLCNGPIGIERNIAETLGVDVSEIYVEFVGLNHMVFAKTVYHNGKDVTKDVVFKMTEDEAGSSLKNINATGWDKTFLRTLNMIPIDYLRYYWQTKQQLEDQARAYAEHGTRAEVVKKVEAELFELYKQEELAEKPKQLEQRGGAYYSEAACNLINSIYNDKRDIQIVNTRNNGAILDIDPDSAVETNCVITRQGPIPLASGRLPIAINGIIQEIKTFERLTAEAAVTGDYDKALLAMTINPLTPSESVAREMLDELLEAHKEYLPNFFK

SEQ ID NO: 1766 - protein, 100 aa, Listeria monocytogenes
MFEVNDTTYILRFNKQKVKTVELTSGISLVAALTANKGILSYQVIETLFVSGLVEEKGLVPVKQKEALEIFDKLVEEQGLISLNVAVIEKLQEDMGFLFR

SEQ ID NO: 1767 - protein, 334 aa, Listeria monocytogenes
MAIPRDLKELNKKNIKSILRQQGAMTKAEIAEVTGLSVVTVNKLIRDLVENEEILEQDNSVATGGRRAVSYEINPNFQQVLVISLQEKWKKITYSFSVYNLLGEPEFVEDMSGEDLDITALKRNTKDIICAFPKISCVVIGVPGIEIGGKLRAMDFPLLLNVQLRETLEAEVNLPVLVETDTNAAILGYKNRPMKEENIVGLYYPERFPPGAGLLMNGEILKGQNGLAGEIKHMPLQVDWDNFDFSVDEIKAHIRKMALLTMSFYDPETIVLYTNFYFGQKDFMEELKEELKQVYPYAVLPEIVLSRKFTTDYRIGLLAFGIDYLENNMTDWRI

SEQ ID NO: 1768 - protein, 471 aa, Listeria monocytogenes
MQQEATGGQKIRPIPIIASFLMAGFIGLFSETALNMALSDLIQVFDISSATVQWLTTGYLLTLGILVPISGLLLQWFTTRGLFFTAVSFSIAGTLIAALSPTFAMLMIGRVVQAVGTALLLPLMFNTILLIFPEHKRGSAMGMIGLVIMFAPAVGPTISGLILENLTWNWIFWISLPFLIIALLFGMKFMQNVSVVTKPKIDILSIILSTLGFGGVVFAFSSAGESGWGSATVLVSIIVGGIALGLFVWRQLTMEKPLMDLKVFKYPMFTLGLILVFISFMMILSTMILLPLYLQNSLALAAFSAGLVLLPGGVLNGLMSPFTGRLFDAYGPRALVIPGFIVAVVALFFLTRIEVGTSALTIIVLHSVLMIGISMVMMPAQTNGLNQLPPKLYPDGTAIMNTLQQVSGAIGTAVAITIMSAGQKAYMETAQGVGPEQMVASLTAGIQNAFVFGLIMACIGLLCSLFIRKAK

SEQ ID NO: 1769 - protein, 125 aa, Listeria monocytogenes
MKKYKKWWITIGIIFLLSVIGYVYWFAIPEHMANKAVGNYLAEQKIKSSQIETRVIKKDWKMGGYLTTIIFKDDPNLKYEYSYDERIDLPYHVFVDAYKDGSGQTEGEMKHPPLEEQLEEMNKSK

SEQ ID NO: 1770 - protein, 125 aa, Listeria monocytogenes
MKKYKKWWITIGIVLILCVIGYVYWFVIPKHTANKAVDNYLAEQKIKSSQIETRVIKKDWKMGGYLTKIVFKDDSDLKYEYVYDERYEYPHHIYLIAFKDGSSQEDNQMKHPSLQEQLEEMNKSK

SEQ ID NO: 1771 - protein, 119 aa, Listeria monocytogenes
MKKYKKWWITIGIVLILYVIGYVYWFAIPKHTANEAVDDYLAAQKINSTQVKTRDIQKDWTRGGYYVTIVFKDDPNLVYEYNYNSKRNTPYHINLLVFKDGSSQEDDQVKHPPLQEQKD

SEQ ID NO: 1772 - protein, 186 aa, Listeria monocytogenes
MAESLITKKAIAGGLMELCQHKRFEKISIADITNICGLNRQTFYYHFTDKYDLLTWTYENDFFHCLADGITLGNWDKHVLKMLESIKENADFYKNTVSADASILSFCFSKLTNSLFMDLFEKIDTNATVNEADRVFYAEFFSYGCSGVLIKWITRGFKEAPETIANQLFRLAKDTEFLANSMYREN

SEQ ID NO: 1773 - protein, 170 aa, Listeria monocytogenes
MAFEENLYCDYTPGAAKAVAGKDVILAVFNAAGDKLLAVAGQQGLTVNRSKDSIEITSKDTVGGWKSKIGGMKEWSIENDGLYVADAESHKELAKYFESDSPVCVKIINQASKKGLFGGLAIVADYSFEAPFDEAMTYSVKLDGMGALVDLTITEGGDQMPGETPVAPAE

SEQ ID NO: 1774 - protein, 566 aa, Listeria monocytogenes
MKNKKRTLVALTGAAIGTGIAAKKISEQKAAEKERAVDEAIKARYYGDKQVYFVGGGIASLAGAVYLIRDANFDGKNIHIIEGMHILGGSNDGAGSVEHGFVCRGGRMLNEETYENFWDLFSSIPSLDMPNFSVTEEILNFDHLHPTHAQARLVDKDRNILDAHSMGFNNNDRMLMTKLLATPEEKLDNLTIRDWFDEHFFETNFWYMWQTTFAFQKWSSLFEFRRYMNRMMLEFSRIDTLEGVTRTPLNQYESLILPLKTFLDKHHVDFTINQTVEDIDFKDAPGITATALHLSDESTIELGPDDDVIMTNACMTDSATLGDMNTPAPKPEEKPISGELWYKVAQKKPNLGNPEPFFAHEEETNWQSFTVTCHGDKLLKRIERFTGNIPGSGALMTFKDSNWLMSTVVAAQPHFKAQDANTTIFWGYGLYPDRVGDFVKKPMKECTGEEILYELMCHLNWQDDFEEIKADIINVIPCYMPYIDAQFEPRAMSDRPAVVPEGSTNFAMISQFVEIPKDMVFTEEYSVRAARIAVYTLLDIDKKICPVTPHNRDPKVLAKATQTMFR

SEQ ID NO: 1775 - protein, 367 aa, Listeria monocytogenes
MEKSSIYGLTWTNLTEWLEAHGQKKFRATQVWDWLYRKRVKTFEEMSNVPKETIELLTANFVMNTLEEQVVQESTDGTTKYLFKLSDGNLIETVMMKQEYGLSVCVTTQVGCNIGCTFCASGLLKKSRDLTAGEIVEQIMNVQHYLDGRNLEERVSHVVVMGIGEPFDNYDNVMDFLRVINHDKGLAIGARHITVSTSGLAPRIIDFANEDFQVNLAISLHAPNNELRTSIMRINKTYSIEKLMEAIHYYVNKTNRRITFEYIMLKGVNDHKKEALELAALLGEHRHLAYVNLIPYNPVDEHIDYERSTKEDVLAFYDTLKKNGINCVIRREHGTDIDAACGQLRSKQIKRVGVRERMKQKQAAAEE

SEQ ID NO: 1776 - protein, 159 aa, Listeria monocytogenes
MEVEIVERNAFTAVGKKRTFSVENDAQKEKISQFWQEVNANGDAERINELAEFATIDGILGVCQMNGDQMDYYIAIESELTPPADMEKLTIPASKWAIFKSVGPLPNAIQKVWEYIYGEWFQTCNYTHGNAPELEVYTEGDTTAVDYYSEVWIPVVEKD

SEQ ID NO: 1777 - protein, 121 aa, Listeria monocytogenes
MIIVTNTIKVEKGAAEHVIRQFTGANGDGHPTKDIAEVEGFLGFELWHSKPEDKDYEEVVVTSKWESEEAQRNWVKSDSFKKAHGRTKDTREQREDRKGIVGNAIARFEVVHVQNPVIVEK

SEQ ID NO: 1778 - protein, 114 aa, Listeria monocytogenes
MKENKVQWQVIAGIILALIIAIFAVINVDPVEVNFLFAQAEWPLILIILGSVLCGCLIIFFLNIAKSRGMKKKVKQLTTEKAELERQLAAAKAMKTHSSKVEKRDTENAVDTTK

SEQ ID NO: 1779 - protein, 783 aa, Listeria monocytogenes
VIHSKYLWNIEEAAEDKASQLAEQLKISLPLAKLLWKRKITTQGQFDKFFHPEKYESYDPFLFAEMDLAVARIKQAIERNEQILVYGDYDADGVTSIAVLMKTLRHLGADADFYIPNRFTEGYGPNIAAFDMAKNQGTDLIITVDNGIAALEVMAHAKEIGLDVIVTDHHEPREIMPEAVAVIHPKHPKSAYPFDELAGVGVAYKLSHALLGEEPKELLDLVAVGTVADLVSLTDENRLLVQLGLRQLRESANLGLAVLAKKASLKLEEATEETIGFGLAPRLNAVGRLGPADPAADLLLTEDPEEALFLAEEIDDANKERKQIVVDTTKLAMEAIEAKDTLGNVLVVYGEGWNTGILGIVASKLVGTYSRPAIVLGIDPVTGIAKGSGRSVDAFHLYQALDKHRDLMMAFGGHPMAAGLTLPAENLTELEAKLQEEASYLSEEDFRPALKIEEKIKLADVSVAFIAQLEKLAPFGMDNPKPIFLLENMHLKGTKRIGADKTHLKTMLATEKNDATLDSIGFGVGDLVDKISPTAAVDVVGELSINEWNNVKKPQLRMMDIHISHWQLFDVRNKSEWARILQEQTESRVFVCFEERTIGTLGEQNYILVNEKADFVADFQTEELVFADMPTNIELVETIVRETKPERIFVHFDAAEGNQIPAIPDRLAFAELYSLIKKFQPFPIEKYTPRLMQKFGWNKEQIDFMSKVFFDLEFAKMDSGQIIINEVVEKRNLDESLVYQQKVEEITTRKKLLYSNYTELHSWMKSMMETSIYPNAEELENGN

SEQ ID NO: 1780 - protein, 173 aa, Listeria monocytogenes
MEIKDLQDYVAIVNDWPKKGIVFKDITPLMNDGEAYRFATDKIVEYAKELKIDIIVGPEARGFIIGCPVAYALGIGFAPVRKPGKLPRETIEMEYDLEYGTNKLSMHSDAIKPGQRVLITDDLLATGGTIEATIKLVEELGGIVAGCAFLIELKELEGHKKLNGYDRLILMKL

SEQ ID NO: 1781 - protein, 129 aa, Listeria monocytogenes
VKSLSFMRVLEAVRTMLQEKGGLDISIVMRDQVEMPTTMIEMIDQEEEESQTAWKEKYRFAIHHYTNETDLAGVEKIDTLIQTGFTLPEGYKLIAVRHYGKQNLVKENTLIHAKTSFEVSICRELKVKI

SEQ ID NO: 1782 - protein, 738 aa, Listeria monocytogenes
MAKEQNLTAEQVIDMASHYMNQEHLALVKKAYEFARDSHKEQFRKSGEPYIIHPIQVAGILVELKMDPSTVASGFLHDVVEDTPVTLADLEEVFGSEVAMLVDGVTKLGKIKYKSHEEQQAENHRKMFIAMAQDIRVILIKLADRLHNMRTLKHLPVEKQRRIANETLEIFAPLAHRLGISRVKWELEDTALRYLNPQQYYRIVHLMKQKRDARERYLHDVIDGVNENLDELNIQADISGRPKHIYSIYRKMSEQNKQFNEIYDLLAVRIVVSSIKDCYAVLGIIHTRWKPMPGRFKDYIAMPKSNMYQSIHTTVIGPQGEPLEVQIRTHEMHQIAEYGVAAHWAYKEGKVVNSKTSFDNKLTWFREILEYQNESDNAEEFMESLKLDLFSDVVYVFTPKGDVYELPNGSVPLDFAYRVHTEIGNKTIGAKINGKIVTLDYKLKTGDIIDILTSKHSYGPSRDWLKLVQTSQARNKIKQFFKRQAKEENVEKGRDLVEKEIRQLGFEPKKIMAAENLRKLADKLNFSHEDDLFAAVGYNGITALQVANRLTEKLRKERELEAETEKLLTQSENKPSNSDANNEKLKIKHNAGVVVQGVGNLLIRLSRCCNPVPGDDIVGYITKGRGISIHRQDCPNVQAIEPERLIEVDWEDADSQAKNDYNVDIEIYGYNRNGLLNDILQVINSLTSNINGVNAKVDNNKMATLVVTLQIHNINHLQRVVDKIKQIPDVYTVRRLMN

SEQ ID NO: 1783 - protein, 150 aa, Listeria monocytogenes
MRVLLQRCYEASVSMEDEVISEIAGGLCLLVGFTHTDTPETVDYMAKKIVGLRIFEDESEKMNISLAERGGAILSVSQFTLYADVSRGKRPSFTKSAPGEKAEALYDLFNQKLAEAGFIVETGVFGAMMDVKIVNHGPVTIMLDSEEMRK

SEQ ID NO: 1784 - protein, 427 aa, Listeria monocytogenes
MKNKFIFITVVSILLIAAGIFTTIAMANANSVVVKAEVLNVRSGPGLAYDVTSQARKNEVLRVVGEENQWYKVQLDNGNSGWVASWLVENTDVSAASNSVAIVSSDGGLNVREKPSTSSKSLGLLNNGDQVTVTSQQNGWAQIQYNGTSAWVSSDYLTIRESVTKVDESELQTVTIRDDSTNIRNKPSRDGAVIEKANSGQGFAIQGVQGDWYKIRTTSGEEGYVANWVVDVSDKGQTSSPRSKTTKLSEATIVIDPGHGGNDPGAKGANGTIEKEMTLKTAKQLKQKLEARGAKVILTRNSDKYVSLKGRTNIAAENNADVFISIHFDSLEDASKGVSGQTTYYYDNSDKSLAESINTTLGKDLPTTNRGARVGDYYVVRENSQPAVLLELGYLSSAKDENNINSASYRSQIAESVTDGLSNYFSN

SEQ ID NO: 1785 - protein, 131 aa, Listeria monocytogenes
MVTLYTSPSCTSCRKARAWLEEHDIPYKERNIFSEPLSLDEIKEILRMTEDGTDEIISTRSKTFQKLNVDLDSLPLQQLFELIQKNPGLLRRPIIIDEKRLQVGYNEDEIRRFLPRRVRTYQLREAQKMVN

SEQ ID NO: 1786 - protein, 322 aa, Listeria monocytogenes
MTEQREKLLEIHNLKQYFNKGTASEVRAVDDISFDIYKGETLGLVGESGCGKSTTGRTIIRLYDATGGEVIYNGKDVHARKSRKEMLEFRRKMQMIFQDPYASLNPRMKVKDIIAEGIRIHGLAKTPEETNKQVYDLLETVGLSKEHAGRYPHEFSGGQRQRIGIARALAVQPEFIIADEPISALDVSIQAQVVNLLRQLQKEKNLTYLFIAHDLSMVKYISDRIGVMYFGKLVELAPANDLYHAPLHPYTESLLSAIPLPDPNYERTRVRKTYDPTSHNYKDGDEIKMREIAPGHFVYCSEEEEVMYKEKHAKLTAEAAAK

SEQ ID NO: 1787 - protein, 358 aa, Listeria monocytogenes
MEKLLEVKDLNISFHTYAGEVKAIRGVNFDLYKGETLAIVGESGSGKSVTTKSIMRLLPEGNSEIKSGQILFNGMDIAKAHEKQMQKIRGKDIAMIFQDPMTSLNPTMTIGKQISEPLIKHQKISKHEAHKTALRLLQLVGIANAEERIKQYPHQFSGGMRQRVVIAISLACNPQILIADEPTTALDVTIQAQILDLMKDLQKKIDTSIIFITHDLGVVANVADRVAVMYGGKIVEIGTVDEIFYNPQHPYTWGLISSMPTLDTDDEELFVIPGTPPDLLHPPKGDAFAARNKYAMQIDLEEEPPLFKVSDTHYAATWLLHPDAPEVTPPDAVLRRQEQFAELHPGMQAVHAKGVEVE

SEQ ID NO: 1788 - protein, 344 aa, Listeria monocytogenes
MAEHKIAKERFQPAHILDAEAEKINRPSLTFLQDSWLRIRKNKAALVSLIVLALVIIMAIVGPYLSQNLGPEHNINRQITENASLPPKVQGFENMPFWNGHQSIGGEDVDIYKQNNIKEGTYYWLGSDTLGRDQFARIWAGTRVSLIIAVVAALCDLVIGVAYGLISGYVGGRVDNFMQRVLEVIGAIPNLVVVILMMLILEPGIVSIIIAIAMTSWITMARVVRGQVLKLKNQEFVMASMTLGESTPKILIKHLIPNISGIIIINIMFSIPSAIFFEAFLSFIGLGLPAPAASLGVLVNDGYKTLQVLPYMILYPCIVLCIIMIAFNLIADGLRDAFDPKMRD

SEQ ID NO: 1789 - protein, 138 aa, Listeria monocytogenes
MQVLVLPENKDINYIKTVQEVKRFFADFERFRMITGLSKKPHLLRNGFLEEPQFEPVAFSARHNKEVILEARWLVEKYTEMLNQMDDLYRTILMECYVERKQDVAVMMDLPYEIAQFKRIKKRAVLELATLMGILVRK

SEQ ID NO: 1790 - protein, 309 aa, Listeria monocytogenes
MVKYTLKRVLYMLITLFIIASVTFVLMKFLPGTPYRNQEKLSDEQIHMMNEKYGLNDSIPVQYFNYMTGLVKGDLGVSFQLDNRPVSEILSALIGPSVQLALEAMAFGVIFGILLGVIAAMYQNRWPDYTSTFIAILGKSVPSFVFATVLQYWLGAKLQIFPVAGWGTFADTILPAFALAMFPLATAARFMRTELIDVFASDYVLLAKAKGNSRTEVAVKHAIRNALIPLITVLGPLSVALMTGSLVIENIYSIPGIGSQFVSSIQTNDYPVIMGTTILFAVMLVFVILVVDILYGLIDPRIRVSGGRK

SEQ ID NO: 1791 - protein, 558 aa, Listeria monocytogenes
VKKSKLFLTLGLTLLLSLVLVACGGGSDSKSDKKGSDSGKASGEQVLNLTESALIPSADSTKADDQVGLNVVNQTNEGLYALDKDGIPAIAGAAEEPKISDDKTVYTIKLREDAKWSNGDPVTANDYVYSWRRAVDPNTAATYSYLFDAIKNGGDIVAGKKKPEELGIKAVDDYTLEVTLSKPTAYINSLFAFPTFFPLNEKFVTEKGEKYAQNSDNMLFNGPFELKDWTGTNKKWTYVKNDKYWDKDKVKLKQINVQVVQDSGTGLNLYNTDKVDRTVLSADYAAQNKNNKDYVTVNDSSTFYIKFNQKRAGKDTVFANKNIRKAIALAIDKQSYTDTVLKNGSKPANNLVPEGFTFDPGNKEDYTKESGKHLEYDVKEAQKAWKAGLKELGVNEITVEFTSDDTENARKSSEFIQDQLQKNLDGLTVKLKNVPFKVRLQNDQNQDYDFSMSGWGPDYQDPSTFLDLFVTDGAQNRMSYSNKDYDKILNDASVTYAADDQKRWDEMVKAEKILLTDDVAIQPLYQRSTAYLQKDYIKNLQKNPFGPDYTYKETYLTK

SEQ ID NO: 1792 - protein, 209 aa, Listeria monocytogenes
MTKKPIVVGVTGGSGSGKTSVTKAICNHFSGHSILMIAQDVYYHDQANISFEDRLKVNYDHPLAFDTDLLISHIAALRRYESIEKPIYDYAKYTRKKEVEIQEPREVIILEGILILEDKRLRDLMDIKVYVDTDDDIRFIRRLLRDMKERGRTMDSVIEQYLSVVKPMHNEFIEPTKKFADIIIPEGGENHVAIDLMTTKIESILQKHV

SEQ ID NO: 1793 - protein, 217 aa, Listeria monocytogenes
VNDIIHDYLLKNIPKSSPFFKELEAYAKENEVPIMEPDSLYCLLQILDIQKPKRILELGTAIGYSALKMADKLPDAEIITVERDEERYEQAIHNIQRYGASDRVKVLLTDAIEGAEEILAHGPFDAIFIDAAKAQYEKFFHIYTVSLAENGVIYSDNVLFKGLALDMTPEKQRKLRVARKMRHFNDFLVTHPDFETTTIPLGDGLSISKRKKTGGVS

SEQ ID NO: 1794 - protein, 356 aa, Listeria monocytogenes
MKNTKGKKITIIISIIILILVIATFSGYYYVKSQLEPKDEASKEKITVEIPAGSSISDISTILEDKKVINNASIFSFYVKYNNDTNLKAGNYELSPAMNTDQIVKKMQEGKTVAPAKLVIPEGYTLDQIADRIVAYQPKLKKADVLKTMDDPEFVASMIKAYPETVTNDVLNKSIKHPLEGYLYPATYTFKGTDVSAEQIITEMVKATDVNIAKYRDELTKQKMSVHKFLTMSSIIEKEATENVDRKMIASVFYNRLAKDMRLQTDPTVLYALGEHKSKTTYKDLEVDSPYNTYKNNGLPPGPISNSGDSSMEAALYPEKSDYLYFLANTKTGKVYFSKTLEEHNKLKEEHITKNN

SEQ ID NO: 1795 - protein, 142 aa, Listeria monocytogenes
MDRKLLKEKQIQLIFQLEQEENRFIRKRLIEELEFFEALGDREKGLLTAEQKLLILTPSEYREYKRTKSDVQISRIIGVSRSSLAEWKRKKGLNRKKSQPVQQEMIDVLAFHLDKTKEEIGALPASAIECQYEAFVINEANN

SEQ ID NO: 1796 - protein, 208 aa, Listeria monocytogenes
MLHTLIQSLQDFTMWLVDSLGHWGIFLGMLIESVCIPLPSEVIMLFGGFMAEAGKLNFWLVVFAGISGNLVGSLIAYYIGKFGGRALVLKFGKYIFLNVKHLDKAELWFGRYGARAVFFGRVLPVIRTFISLPAGIAKMNVWKFIIYTILGCIPWNIFLTWLGYSLGSNWSVVEKYTRPISYLMLALVIAIVVYLAYKVWNKRARNAK

SEQ ID NO: 1797 - protein, 100 aa, Listeria monocytogenes
MAEEHNHNHEEENIIWITNEEGKEEAYEILFDFDSEDFDKSYVLYFPAGKGEDEEIEILASSYIQDEEGKQGQLKPVETDEEWDMIEEILATFLADEDEE

SEQ ID NO: 1798 - protein, 138 aa, Listeria monocytogenes
MRIMGLDVGSKTVGVAISDPLGWTAQGVETIQIDENRKQFGYDRVKELVLEYEVEKVVVGLPKNMNNTIGPRAESSKIYAEVLEARIGLPVVLWDERLTTSAAERTLIEADVSRKKRKEVIDKLAAVMILQSYLDTTN

SEQ ID NO: 1799 - protein, 90 aa, Listeria monocytogenes
MDSKDQTMFYNFGDDSIEEDVKKLMKQVYVALEEKGYNPVNQIVGYLLSGDPAYIPRHKDARSMIRRLERDEIIEELVKAYLKNNEIGEK

SEQ ID NO: 1800 - protein, 879 aa, Listeria monocytogenes
MKQLSSAEVRQLFLDFFKEKGHTIEPSAPLVPNNDPTILWINSGVATMKKYFDGSVIPDNPRMANAQKSIRTNDIENVGKTARHHTFFEMLGNFSIGDYFKEGAIVFAWEFLTSPKWIGFDPDKLYVTVYPEDEEAKTLWREKIGLSDDHIVEIEDNFWDIGIGPSGPDSEIFYDRGPAFGDDASDPELYPGGENERYLEIWNLVFSQFNHNPDGTYTPLPKQNIDTGMGLERMVSIIQDAPTNFETDLFMPIIREVEQIAGVKYGHSQENDVAFKVIADHIRTVAFAIGDGALPSNEGRGYILRRLLRRAVRYAKVLTINEPFMYKLVPVVGKIMNSFYPEVENQTDFIQKVIRTEEERFHETLNEGLAILETILKTAKETNEQVIKGADIFKLYDTFGFPVELTEEYAEDHGLKVDHAGFEAEMKEQRARARAARADVKSMQVQGELLANLTEKSAFVGYNSTEHVSEILYLIQNDTLVDEVAAGNEAQVIFKETPFYAESGGQVADKGTIESETGLAYVEDVQKAPNKQNLHRISVKEGVLKTGDTVKLAVDKVKRRETIKNHTATHLLHRALKDTLGEHVNQAGSLVSPDRLRFDFSHFGQITEEELTKMEEIVNEKIWEQINVVIEEMPIAEAKELGAMALFGEKYGDIVRVVQVGKYSIELCGGVHVRNTADIGLFKIVSETGIGAGTRRIEAVTGKEAYRFVTEQENTLKQAASLLKTTTKETPQKVELLQADLREVKRENESLLSKLASAASADIFESPEEIGGVKVIAKQVNAKDMNQLRQFVDNWKDKKIGGILVLGAVQGDKVNLISAVSEEAIKAGYHAGKLLKEVATRCGGNGGGRPDMAQAGGKNPAELGTALDYVSTWVKEQQA

SEQ ID NO: 1801 - protein, 231 aa, Listeria monocytogenes
MTKVLTFENISYWYKTKDESILNDINYDFEAGVFYTVVGSSGSGKTTFLSLAGGLDTQKEGDIYYKGSSLKSIGLQQFRNKYVSIVFQSYNLLTYMTALQNVTTAMEITHVNQPDKKAFALSMLEKVGITEEMARQKVLTLSGGQQQRVSIARALCCETELIVADEPTGNLDERTSKEVVTLFQDLAHKEGKCVIMVTHDPEIAKVSDVKLTLKNGSFVEKKQSMNSLINS

SEQ ID NO: 1802 - protein, 501 aa, Listeria monocytogenes
MNFFKRAWLSMKARKGRSVLQLIIFTVVCVLILSGFTIQSAADKASELAREQLGGTVTLTVDREKQMQTMREEASSSDSSSTESKPQFQSSPIDVSDANDLAKLNHVASYNYYSSTQALASGFDPIESSGDTSSSNDESSTTAETQGPGGGQGGPQMVDADLSISGLLDSATSTDFEAGTSELTSGVAITSADKDKNVAMVEENLAEENDWKVGDSFTVTSSDGNTKVTLKIVGIYKTTDSGSDMAQNFSFLNPYNKVYVPYTVANTIKGSDYKNTVDSAVYTMDDAANISAFEKEAKKVDSIDWDTFKLDANDTLYQQMIGPINSVASFSKNVVYIVSIAGALILGLLVMMQVRDRKYEMGVLLAIGEKRGKLIAQFFVEILIVALVSFGLAAASSHYVAQLAGNQLLAQQNSSTNETTTSTENRGPGGGGGQGGPGGFGQSVSNLTKNTEQIKELDIQVTLEDMLKMGGIGIGIAFISVLLPAALVLRMNPKTILTKQE

SEQ ID NO: 1803 - protein, 111 aa, Listeria monocytogenes
MELNKFVGNKIKQYREERGLNQEALAEKLHTTRQTISRYENGDRKANQDVLFELAKIFNKRLDDFFPERNLPPVDERLVTIAAHIDDDVTEEEMRDILAYIEMKKKLHRGM

SEQ ID NO: 1804 - protein, 325 aa, Listeria monocytogenes
MKMTDPLYGTFEIEPVLAELIQSPLVSRLAHVHQGGSSYLVNPLWDLSRLDHSIGVMLFIRKFGGSLEEQIAGLLHDVSHTAFSHVVDYALDFEEEDYHEQIFEDFVKTSTIPAILEKYGYSFEGIFNDISKWKILEQEAPELCADRIDYTLQDLYRHGKISLAEVKEFLQALVMVDGRLYLANIALAEWFVAQYYSEVIDYFYDPLNVYSYEILAEAMRIAFQQETITTADLRLTDAELLAKLNANSDAREKIQLLASPHLEENEVDFTYHHKKKMRLINPSVLVDGRLIPADELSEKVREMNDWASERSKHGIYIKATKKSKQ

SEQ ID NO: 1805 - protein, 80 aa, Listeria monocytogenes
VKRIILTSTLIVWTIVCIYMSISMVSNNTGIAFPIWLHIILLICFLATSIVNVKKKEYLWSTMLFEGELVVLLSLIIVLV

SEQ ID NO: 1806 - protein, 115 aa, Listeria monocytogenes
MQNDMYNNIRLSVIQLIDSKKENLKENNIKLTIIKNEKDGYVVELDNDKCMAEIVVEEPTYTPYRYISFEVVSLMDGKVKIIYSWYDDETSQWSDIEKELNKGIQFLNNFKTMEQ

SEQ ID NO: 1807 - protein, 361 aa, Listeria monocytogenes
RKHRKEEDLHRQLTAPNTKPDMQQVYAVKSRSVHTQLLKAIEQENILEKYLAFEQSHGPFFNALAELIQATGRAVQELLHHVTFNDKTGTYAVPKSAANSLLLMKKALDNARTENDKDLYPDDWEDYTVLAYTYVNNQGETVTMWLLEKDGKRVENKELQDFLEKHGQELPAISYIELSGEELERRVNDSWKDGVNYLTGQKVSGFSGGVLRSSAYVASVKKTLDSAELIDIGLGLGTAAMRYTPLLAEQIEKLRLAKVGRWMSVDEFEKMLETGKVQMSRNGNRTYVAYPADKDAFPSAADDALYAEFKVNEKTIYPAGKEGWAQIPGPGSLIDRFNQKKGLPGITEMPDALDINNLGGK

SEQ ID NO: 1808 - protein, 295 aa, Listeria monocytogenes
LIYLAILGKIYNEKSYFKTDVLRIMSQEIFKYEIKFDAYLRECAKSTDYQRIAEENLSKLVQEDNNQNVLANVLSFNYTHIPSKVTSEEGDEISIKVKDNVHGKLGNEIIFGIDHGTIDNDTPLYNFTKTYRKLYENKDSEESVLSIDIKVIKIYGHSLSNADYAYFQSIFDFLNIYENPINIIVYYTKYKENEAEIRQELSNAVQKLISRYGQSMDNKEKGKNLLHKLLLENRLTIKKINLKEASKRRRFAPAIDGTKYEARYATSLCSEIKKRSYPIAESHRTREYPRKIFGF

SEQ ID NO: 1809 - protein, 336 aa, Listeria monocytogenes
MKRKFSEEFELQGTQKDFQFVDIKLWTDQALFIDPSLIANAQHKENQNGSIETNYATRAHNSLQSFFSTFFEMFKDISPSKLIKKKDQGRKGINRDEMILNLLQYSTENNALHLGYTADESKGTGCSPKMIYDFFSNMKFKHPSMFDFVNEPFHATGFINEIGKDRSTDLTVSIILDVLCDFTLSICTQYSIPTKEFENYRHYWDPNEKMWKTRNYDLPTNNNGEPIVLVPKSFVTNKFQYDAEYVLKNYILEEKLDELRAQYPSKRLIKSDALKKLRLEHPDAFNKDLVLEYFVEKPGSYKNFMQRVNNGILGTHRGLLTDDEIEKATSETQEGD

SEQ ID NO: 1810 - protein, 209 aa, Listeria monocytogenes
LIDLEKLWIQYDRIIKENGAIILTAQTPFDKVLGASNIDNLRYEWIWEKTAATGHLNAKKMPLKAHENILVFYKKLPIYNPQKTVGHTAVHSYTKKQTDGSNYGRTKAGITGGGSTERYPRSVLTFKSDKQKSSLHPTQKPVALFEYLIKTYTNEGGLVLYNCMGSGTTAIACLNTNRKYIGFETDVGHYESSLSRIANHCCMLKEVQI

SEQ ID NO: 1811 - protein, 290 aa, Listeria monocytogenes
LSDPINIILNNCGFGENLEDEQENDLYNLMEERLEEKDKYVLSVAFIHKLNSYSNCSLEEFLMLELNKYEKYFSDYIKTEVTNKYEEYHKTRNNILTKLSGGLGATHSISVMNFNFTPNQFSDSVKLNEKIGLAHVNVHGSYLANSIFGIDTKSLEDIDTIGSGYRFTKTYRKLTLKTKRSTEILYHDITDIIFYGHSLGQADYAYFQSIFDYLDIYNNTIVLTFYYSDYKENVREEQTIAVRNLIEEYGKTFDNKHKGKNLLHKLLLEERISVTDLEIYEEDYSSKDMK

SEQ ID NO: 1812 - protein, 626 aa, Listeria monocytogenes
MARIPEEVIDQVRNQADIVDIIGNYVQLKKQGRNYSGLCPFHGEKTPSFSVSPEKQIFHCFGCGKGGNVFSFLMEHDGLTFVESVKKVADMSHLDVAIELPEERDTSNLPKETSETAKMVEMHQLTAKLYHYILMETEEGTAALTYLKERGMSEQMMTTFQIGFAPNHHATITSFLEKRGMDLQLAGAAGLLSERDDGQMVDRFRNRIMFPITNDRGQIIAFSGRLFDRDDGPKYLNSPETPVFNKRRILFHFSEARQAIRKQEEITLMEGFMDVISAEEAGVQNAVASMGTSLTEEHADLIKRLTNRAIICYDGDRAGIEAAYKAGTLLVERNRLDVFVLQLPAGKDPDDFIRASGPEKFKEVYKQQRMTWTAFKIHYLRKERNLQNETEQIGYIDDCLREIAKLDQAVERELYLKQLADEFELTIETLKQQLQQSLKNSQKSRQMASYNEPPIDDSFMGMMPQEGAEMLFSFEQPAQKLSAHTISEQQLMKAMMESRDNFLLIKQLLGDTTFYHDNYEALYTYLIGYFAEGNDADPTKFMDSVPDAAMKGLISSLEMVISPDEQGKPQFEDYIRSLKRYKLEQKKKELEQELATYNRENDNENEIRVMLEIVQLNRQLNSGQLD

SEQ ID NO: 1813 - protein, 146 aa, Listeria monocytogenes
VPQILVDADACPVKAEIKQVAKEFQLEVTFVASFNHYSVNTNGENWIFVDTGKESADMRMMNLAKKGDIIVTQDIGLASILLAKGTFVFSNRGELYREEEMSLMLDIRYRHAKERQQGKYSKGPKAMSDQDRSLFKDRLTTFLQNK

SEQ ID NO: 1814 - protein, 150 aa, Listeria monocytogenes
LYEKLVNKYQDEVTIREEKMPYKLPGLYLNGMIFISKDQSSIEKGCVLVEELMHYKYTVGNITKQETIMDKKQEIFARRKGYEELIPLDDIIACFYLGLREYFEVAEFLEVTEEFLRHTVSHYAEKYGPMYDYGGYFINFGNSIDVYKKF

SEQ ID NO: 1815 - protein, 274 aa, Listeria monocytogenes
MTQPAVYVVSDSTGETAELVTRAALSQFGQTPKFIHRFHHVDSSHMIEEIVDLVAVNNGIIVHTIVLESVREELNKTAQAFGVPIIDLFGPLLNQLEETYKIKPLSEPGRVRSMDEAYFNKVAAIEFAVENDDGRNPRGILQADYVLIGISRTSKTPLSQYLALKGLKIVNIPIVPEAQIPDELFEIDPKKIIGLKISKQKLTKIRQERLISIGLPGAGTYASNQRIDEELAIFNKLASKLNCFVLDVTNKAIEETANEILIHIGEIVDENLEL

SEQ ID NO: 1816 - protein, 688 aa, Listeria monocytogenes
MSKDFLLEIGLEEMPAQYVTSSVLQLEKRVTDWLTENKIEFGEIKTYSTPRRLTVLVEGMAEEQANRVEEAKGPAKKIALDEEGNWSKAALGFAKSQKVDPADLTFRDIKGVEYIYIKKEVIGEKTSTLLPSLEKVVTSMTFPVSMHWGSNDLRYIRPIKWLIAMFDEEIIPFEITGVTTSNTSRGHRFLGKSATIKQPSDYPNALLEQFVVVNAEERKQAIVEQLRELESMENWQIKEDDDLLEEVTNLVEYPTVLSGNFEKEYLELPEEVLITTMKEHQRYFPVFSQAGELLPHFVTVRNGNHENLDTVARGNEKVLRARLSDADFFYQEDLKMTIDEAVAKLQNIVFHEKLGTLTEKMKRVQKVALMLADYLDWQEEDKQDIIRLTNIYKFDLVTNIVGEFPELQGLMGEKYALLQGEKPAIATAIREHYLPNSAEGELPQTDLGSLIAIADKLETLIGFFCVNIVPTGSADPFGLRRSAFGAMRIIQANGWNIPMLEVISRIVDMERAEGSTELPDADVKKEVQTFLKNRLRVILQGHHIRHDIIDAVIGGDPNVIPQLIDRAQILNEHAEAEWFRPTIEALSRVVKIAKKYEDGVEVDPALFENEYEQALFDKLEKLKFDYAGLTIIERLKAFADLRTTIDAYFDNTLVMSDNDELKNNRLALLFELASFIKEFAQMDEINVK

SEQ ID NO: 1817 - protein, 296 aa, Listeria monocytogenes
MNLQTMIRTLQDYWSEQGCIMLQSYDVEKGAGTMSPYTFLKAIGPEPWKAGYVEPSRRPADGRYGENPNRLFQHHQFQVVMKPSPDNIQELYLGSLEKLGINPLEHDIRFVEDNWENPSLGCAGLGWEVWLDGMEITQFTYFQQVGGLECFPVTSEITYGVERLASYIQDKENVFDLEWTEGISYRDIFFQAEFENSTYAFETSNTDMLLTLFDTYEREATRQMQDGLVFPAYDYVLKCSHTFNLLDARGVVSVTERAQYIGRIRNLARRIAKTFYESREKLGFPLLKEEGGKRHE

SEQ ID NO: 1818 - protein, 255 aa, Listeria monocytogenes
MEKCEGIVIRQTSYRESDKIVRMYTREFGKIGVVARGAKKTKSRLAAVTQLFTNGYFTFFGGNGLGTLQQGEVIETFSSIQQDIFMTAYATYVCELLDKATEERQPNPYLYELTFQILRDIDEGYDPQILTQIYEMKMLPVLGLYPTMDKCAICGETTGHFDFSTSSNGIICHRCFEKDRYRMHLPENVVKLLRLFFIFQLDRLGNIDVKQETKDWLQKAIDTYYDEYSGLYLKSRKFIREMDKWENMLKKDSDD

SEQ ID NO: 1819 - protein, 209 aa, Listeria monocytogenes
MGMLLILLVSLFILTFIGVVVGIILLIVRKEKWAGIIVAGLSVGIGFLVLVAGLNITTIKLFEGFNNPLSIHNYNSSNDPFTNDYSEDYDDDYYDDYIDVSYGESVEIENDSTVTIYKPELFQIKESYDIYKVKVKYANTSSDPISFYSEDIALYDNADDDYGQQITEEGFAGEIQPGETKELTLYYEVYNLGPYDVEYDNYNWTTSKE

SEQ ID NO: 1820 - protein, 301 aa, Listeria monocytogenes
MSEPFKSGFVAIVGRPNVGKSTLLNHIIGQKIAIMSDKAQTTRNKVQGVYTTDESQIIFIDTPGIHKPKHKLGDFMVKIALNTFQEVDLIYFVIDASTGFGRGDEFIIEKLKNVQTPVFLLINKIDLIAPEDLFKLIEQYRDLMDFDEIIPISALQGNNVPNLLEQTNANLEIGPMYYPKDQITDHPERFIISELIREQVLQLTREEVPHSVAVVIEGIEKNPKTEKLTINATIIVERSTQKGIIIGKQGQMLKQIGMRARKEIERLLGSKVFLEIWVKVQKNWRDKEHYLQDYGFDREEY

SEQ ID NO: 1821 - protein, 131 aa, Listeria monocytogenes
MKENNFISLAKQAREFAYVPYSKFPVGAALVTKDDEVVLGCNIENASFGLTNCAERTAIFKAVSEGKRDFKQLVVVADTDGPVSPCGACRQVISEFCAPDMPVILTNLTGKTATVTVKELLPGAFTSEDML

SEQ ID NO: 1822 - protein, 131 aa, Listeria monocytogenes
MLMDLKDRKYKRSKNYAESFHHAFTGLKTAFLEERNMRFHTFAALAVIICGFFFHVTKSEWILLILSIFGVLTLEMVNTAIERAVDVATEQYIDEAKKAKDVAAGAVLLAAIVASFIGLIIFIPYFCQMFL

SEQ ID NO: 1823 - protein, 161 aa, Listeria monocytogenes
MTVLEIDLLDETKNLLDEDKQLVENILQFAAEYLKIEQGTELSLTFTTNEGIREINREYRDKDQATDVISFALEEMGDGETEIDWGEFDLETPRMLGDIIISTEKAEEQAKDYGHTKARELGFLAVHGLLHLLGYDHMEPDEEKVMFGLQKEVLDAYGLER

SEQ ID NO: 1824 - protein, 231 aa, Listeria monocytogenes
MLHTIDFSDIFSSDYSSKISFKKGEIIHSYRDYEEKAPQIGAILEGTAVLEGPTNEGRWMINALIGQHALFGMESLLETKTAPELTEYRVRALENGTVLFIDREFLLNYLYANPQFFHLILDEVIVRYLFTSKNYKNINQAPIVKVTRILVEIIELLHLHQTEGSIELPVYVTQTFLADYCRSSRARVTEVLEELRESGLLLSKKPITISSHENLLDQVDSFQTGNGLLTR

SEQ ID NO: 1825 - protein, 381 aa, Listeria monocytogenes
MSEDLFDVEVRNFEEGDKVTGTVTSVEDKQVYVGIPGSKLDGVVPISELSNIHVETASDVVSVGDTLDLIVTKVEDDILVLSKRKVDAEKASDDIKAKFESGEVFEAVVSDVVKGGLVVDLGVRAFVPASLVEDHFVEDFADYKGTTLTFKVVEFEPENNRVILSHRAVVETEKASQKQALLSEIKEGDVIEGTVQRLANFGAFVDIGGVDGLVHISQISYKHIATPQEVLEEGQKVTVKVIGIDPENERISLSIKATLPGPWDGITEKAQVGSVLEGKVVRLVTFGAFVEIFPGVEGLVHISQISHEHIGTPQEVLSEGQTVEVKVLEVNEADKRLSLSIKELQDAPVEEADYELPEENTGFQMSDLIGDKLKGLQNDDK

SEQ ID NO: 1826 - protein, 224 aa, Listeria monocytogenes
MTKKICIAIDGPAAAGKSTVAKIVAKKLRFVYIDTGAMYRAVTYIALKNNIAYEDEKAIAALLQKTVIRFEPGEVQQVFVGSENVTEVIRSIEVTNHVSIVAAHPSIREALQERQQVFATEGGIVMDGRDIGTAVLPNAELKIFLLASVEERAERRYKENMAKGFTGDLDQLKKEIEERDHLDYTRTHSPLKKADDAIEVDTTSMSIDQVANKILSLAELKINN

SEQ ID NO: 1827 - protein, 320 aa, Listeria monocytogenes
MAKVALITTGGTIASKKTASGKLASGELSGEELAALCQLPTEIQIDIYSTFQLPSMHITLPDLISLKQLIESIFMDETYDGIVVTHGTDSLEETAYFLDLAVTDARPIVVTGSQRAPEEPGTDAYVNIRHAIYTACEINLRQAGTVVVFNERIFAARYVKKVHASNIQGFSAFGFGYLGIIDNDQVFLYQKPLEHECFDIRLDLPEVVVIKCYIGADGLFIDAAIDSGVSGIVLEGVGRGQVAPKMMPAIIRALDAGIPVVITTSAEEGNVYTTYDYEGSTFDLYNRGVILGKDYDSKKARMKLMVLLASQEEINQTNFR

SEQ ID NO: 1828 - protein, 239 aa, Listeria monocytogenes
VVKTRKEKREYEEPADYDMSSEGQDEFNNEPPMLSRSDSRRGKKKTIFRYPLLNLLIVFFLLIPIVIVIVFVTVQNMGSSNEVKTETESTVNVSDNTQSKEEKEKAKKAAEEKAAAEKAAEEKKAAAEKAEADKKKQEEDAVKAANAKKEQEAAEEKAAADKAAAEKAAAEKAEQQKANEASQQKAGGSHTVKAGDTLYSIARSTYGQAGAAAGVEKIKQANGLGSDNVPVGTVLTIPQ

SEQ ID NO: 1829 - protein, 235 aa, Listeria monocytogenes
MGLMKFQLFIQPKLDVLQGNIVEYEILLRDDSAVPRFPLSELEAVLADEELYLAFSEWFSEAFLDVLKKYPNDRFAINIAPQQLFYIETLHWLDKLKSESHRITVEMTEDIFDVPGHKRHLNANDKNAFILNKIKVIHGLGYHIAIDDVSCGLNSLERVMSYLPYIIEIKFSLIHFKNIPLEDLLLFIKAWANFAQKNKLDFVVEGIETKETMTLLESHGVSIFQGYLVNKPFPV

SEQ ID NO: 1830 - protein, 467 aa, Listeria monocytogenes
VNLEKELKEYLGFDEFRPGQKEVIETALAKQNCFAMLPTGTGKTICYQLAGHLMDGLVLIVSPLLSLMQDQMERMRAHGEKRVAALNSFLKREEKGQILASIHSYKFIFLSPEMLNNETVKNLLLKQKISLFVIDEAHCISQWGHDFRPDYLMLGRFIQEAKFPVTMVLTATATKKVRADILTQLHLTDCAQIVYSVNRPNISLQVEKFSNQHVKKDRLYELVRKLQTPGIIYFSSKKLAESTAHELSEIAELRVAYYHGDMDTEDRIIIQQQFVYGQLDVICATSAFGMGIDKADIRYVIHYHMPADLEAYLQEIGRAGRDGEDSVAILLYANGDEFIQMQLADQDIPDANLMNLTTEQRKTLPETEQRFIDYYQRSGLSTKELTDKMDYRKKWKRANLQQFIGYLHTTDCRRNYILRYFEEAPLEVTPENCCDLDGAEIINFEKRAKIKQKEIPTWEAYLAYLLQ

SEQ ID NO: 1831 - protein, 335 aa, Listeria monocytogenes
LDKLDNYIVTILEKSITPRKLPFLHTVLAGRRTGQAVQDIHLFQMQHLFGLVPNLKANYLEKRLLELVHQGSIISTENGYVTQGQLVATFENDYPNFQGFTFQRQAFAFFSHLRLAVQVVSNIHHHESYYLPVIRDKKAQQFIKHWLKYQDKTNLADKLYGELFAWMNKLAVARPAFLVERFSGGELMGYTTEQIASKYQVEKWDVYFEVLHEVHRLLTEMKKKPEEWPILASLVPDELNGLTSSAMQTYVLWQNGADLEAIERIRNLKKSTIHDHFVEIRATLKEANVPYLPEEAIIQTIITKKWNLLREIKAEFPDLDYYQIRLAVVSREGEQ

SEQ ID NO: 1832 - protein, 74 aa, Listeria monocytogenes
LKYCLVEKDTCIACGACSIHAPDVFDYDTEGLAFNILDNNTGTKEIPEDLVEMVIDAEFACPSLSIKVSDSSFH

SEQ ID NO: 1833 - protein, 203 aa, Listeria monocytogenes
MKNYSMKVFVSVAVLGTLAFILMMLQFPLLPSAPFLKLDFSDIPALIGGLLFGPLAVILVELIKNVLLYIVSGSPVGVPVGELANFISGLFYVLPIYYLFHWLRSTKGMVLSTAVGTVLMTGAMAVFNYFVLLPFYIKLGGLPANTDVAWLITYAIVPFNLLKGVIVSAVFLLLYSRLKKWIAKNQTMKERRKFEKRQQEISH

SEQ ID NO: 1834 - protein, 552 aa, Listeria monocytogenes
MPWRGILDELENKIIDQLTEAEEHATYNGKWHGFLTIGYKNKRATVINFSYLCLANLINEMKKSAIKNQTEEAISFKIDVAVDYQLENLGEWNKKALKTKKNYYRRGIALNENFKIALMEQEINANAILLPGDEGLAINVENMNRYLIQTNKNQAQLNLTVDSTIVTFNTVGWFFDGKKIYDLETSELEHGRRNTKQVTPDAVFELVGNAGNYLASQVNQTGEFNYGWFACFDKKIKHYNSLRHASTTYSMLEAYELTGDKTILEAATSALTYLEQNFIYEKDDLAFLIEPELREVKLGGSAATLLALTKYMKITGTKTYLPLSRKIANTILSLQEEDGKFTHVLEYPSLEVKDIFRIIYYDGEAVFGLLRLYEIDRDSKWLEAAAKSFDHFIRDDYWQNHDHWLSYCANEITKYIPDEAYYEFGLKNAFDNLLFIYERETTFPTFLELTVATKEMSLRMKAEGLEGLLRDYPLDELEKTITKRALYQLNGYFYPELAIYYKNPARIDGSFFIRHQSFRVRIDDVEHNISGYVRYYHLLKQGKLSNEAETVK

SEQ ID NO: 1835 - protein, 298 aa, Listeria monocytogenes
MKNWVKVTGAGVLSATLLLGGCGAQSEEKAEANVKTEQTLKPGSQIKLEGAVNVRDLGGYKTTDGLTIKPHKLIRSAELANLSDSDKKKLVNTYDLSHIVDFRTSSEVATKPDPKLTDVDYTHDSVMKDNGTSTSTQDLTASLAKMDNPETFLINANKSFITDETSIQAYKDFFDILLANQDGSVLWHCTAGKDRAGFGTALVLSALGVDKNTVIDDYMLSNKYRADENKKAIEAVAAKTDNKKVIDGMTAVMEVRESYINAAFDEINAKYGSMDNFLKEKLGLTDAKKEQLKKAYLY

SEQ ID NO: 1836 - protein, 450 aa, Listeria monocytogenes
MAFEGLAGRLQETMNKIRGKGKVNEADVKEMMREVRLALLEADVNFKVVKQFIKTVSERAVGADVMKSLTPGQQVIKIVQEELTSLMGGEESKIGTADRPPTVIMMVGLQGAGKTTTSGKLANLLRKKYNRKPLLVAADIYRPAAIKQLETLGKQLDMPVFSLGDQVSPVEIAKQAIAKAKEEHLDYVIIDTAGRLHIDETLMDELKQVKEIATPTEILLVVDSMTGQDAVNVAQSFNEQLEITGVVLTKLDGDTRGGAALSIRSVTGKPIKFIATGEKMEALETFHPDRMASRILGMGDVLSLIEKAQTDVDTEKMKAMEQKMKDNSMTLDDFLEQLQQVKQMGPLDELLKMMPGANKMKGLDNMNVDDKQLGHIEAIIKSMTKNEKDNPDIINASRRKRIARGSGRPVQEINRLLKQFAEMKKMMKQMTGGGKGKKGKNPFGNFKMPF

SEQ ID NO: 1837 - protein, 110 aa, Listeria monocytogenes
LFEKTNRMNLLFDFYQELLTTKQKAYVSFYYLDDYSLGEIAEEFEVSRQAIYDNIKRTEESLEKYEEKLGMLKKYQQREKLFTQLEAQLTKKNFLDEQVKDTLEQLKNID

SEQ ID NO: 1838 - protein, 89 aa, Listeria monocytogenes
MALTQERKNEIIAEYRVHDTDTGSPEVQIAVLTAEINSLNEHVRVHKKDHHSYRGLMKMVGHRRNLLTYLRKKDVQRYRELIKRLGLRR

SEQ ID NO: 1839 - protein, 723 aa, Listeria monocytogenes
MSEKQVFSTEWAGKTLSVEVGQLAKQASGAALIRYGDTVVLTAAVGSKKPRPGDFFPLTVNYEEKMYSVGKVPGGFLKREGRPSDRATLTARLIDRPIRPLFAEGFRNEVQITSTVFSVDQDCSPEMAAMLGSSVALVISDIPFEGPIAGVDVGRIDGKYVINPTIEQAEKSDISLTVAGTYDAINMVEAGAKEVSEEAMLEAIMFGHEEIKRLCEFQQQIIAAVGKEKREIELFVSDPELEAEVKAASEGKMKTAIKTEEKKAREAAIEEVKEEILESYKAKELENESEILSEVAHILEMIEKDEMRRLISQDKIRPDGRKVNEIRPLSSEVGMLPRVHGSGLFTRGQTQALSVCTLAPLREHQIIDGLGTEEYKRFMHHYNFPQFSVGETGPRRAPGRREIGHGALGERALQYVIPSEEEFPYTIRLVSEVLESNGSSSQASICGSTLAMLDAGVPIKAPVAGIAMGLVKLGDDYTILSDIQGMEDHFGDMDFKVAGTKDGITALQMDIKIDGLSRQILDEALTQAKEGRLHILEHLTSTISAPREELSAYAPKIITLNIKPEKIKDVIGPGGKQINAIIDETGVKIDIEQDGTVYIASQDQAMNRKAIAIIEDIVREVEVGEVYTGKVRRIEKFGAFVELFKGTDGLVHISELAHERVGKVEDILKLGDEVTVKVIEVDQQGRVNLSRKALLEKKEQPEGDKKPQAEKKFYPKTKKPESK

SEQ ID NO: 1840 - protein, 346 aa, Listeria monocytogenes
LILEQYGITSFFKEQKIAATSSYGRVTAVFRDYYRVITENEEFLASLKRGNFYELSSTSLPTVGDFVEISGDLQILSVLERKTVFSRMNKDSAEQLIAANFDYALIVMSLNHDFNLNRLERYLTVAWDSGATPIIILTKADLVEDLSFYAQQLEAVAYGVPAYYVDNLSHHGFEALESDLKPNSTLILLGSSGVGKSSFINSLAGTDLMKTAGIREDDSKGKHTTTHREMHLLSNGWIVIDTPGMREFGVGFNQAGLETTFSDVEELAEGCRFHDCSHTQEPNCAVQAALEDGTLTMQHYENWLKLQREMAYHARKNSPALARQERDRWKVIQKSMRTHFKTRPKK

SEQ ID NO: 1841 - protein, 159 aa, Listeria monocytogenes
VKKNLRMLALGFLISAVVLLVYNQFFSTQTKADETKATSTKAGSDENSSTWKNKYEKLLAQQEVDKATEAEAKKKAEEDAKKKAEEAKKVKSYTLKISKGDPSSKAGDELQANGIIKSASDFDKYLRDNDYEKYIRDGSYNLKSDMSYETIAKILTHKN

SEQ ID NO: 1842 - protein, 118 aa, Listeria monocytogenes
MTTVIIILLIAAIALFVISFLQKGDNKQLEKELEDVAAQWMQENFELKQRISELEKAMKMDSPSIEAEQVPDSPKVRELMKKQVITLYTSGIVTSEIAEQSSLPKEEVEKIIEEYLKH

SEQ ID NO: 1843 - protein, 371 aa, Listeria monocytogenes
MDYEKALAFIKSNSTLEQEEGTEVIFKQAQETARGNLDPFLLKDLKQHLGGTNDAIKEAPQEIQMPDFSNLEIATAAALQMRATMGSPNIDLSNGVTTEYRVVEGDYGDIPVRIYRHEEATKPVPAFIFYHGGGFVGGTPAVVENFCKGIAEKLPAVVINVDYHLAPEFPAPAAPKDCYRVLEWVVEQSNELGIDASKIGVSGDSAGGTLAAAVSYMDYEAETNYVGFQALLYPALTLVDEDNDKYQWDISKFGASEDTLPLVAPGIIGMNSSGELLRKAYVRDENPAAPIYSPLSAVDKSIYPPTLIASAEFDALRAFADVFAKELRASGVQTKAIVYQGMCHAFIDKYGIFPQAEDVADEIVQMMKEIF

SEQ ID NO: 1844 - protein, 274 aa, Listeria monocytogenes
MGIMNSLLKQKEMVVKDWLTYYVSVDDPYIFTLKNDHRLMDETGFVLENLFIGMTEDLGKMNAFARELGKAQFITSLGISRILFHIRLLEEFLLDYASEIKTKSANYRELYLFSIKLHQVFSSFTQNLIEGYTHANEQMIVQKENQIIKESTKLIWIAENVFLLPLIGKITDERAKQITETALFEVCEQPVNYLIIDLSGVQLESPNIGKYIEYFFSSLKLVGVTPIITGMQPQTAKVMVQANLTEQHGIKTFATLRQATKTLMKEKEARNAHK

SEQ ID NO: 1845 - protein, 303 aa, Listeria monocytogenes
MQNETLIIEESHARERVDKVIAEMMGKSRSAIQLMLKNGDITVNGELAKPNYKVQVGDEIHYEVREPEELEVLAEDIPLDIYFEDKDMLVVNKPEGMVVHPSAGHASGTLVNALLFHCDDLSGINGKIRPGIVHRIDKDTSGLLMVAKNDHAHESLAKQLKDKTSDREYIALVHGDIVHQKGTIEAPIGRAKEDRQKMAVVRDGKEARTHFEVLERLPGYTLINCKLDTGRTHQIRVHLKYIGHPLAGDPKYGPKNTIKGNGQFLHAAKLGFDHPTTNERMTFEAPLPSSFEKALKSLRQEEY

SEQ ID NO: 1846 - protein, 154 aa, Listeria monocytogenes
MYYYLITLAVIALDQLTKWIVVQNMEIGQKIEVIPGFLYWTSYRNDGAAWSILEGHMWFFYLITVVVIGIIIYIMQKYAKGKRLFSISLAFILGGAIGNFIDRVLHQEVVDFVQTVWGNYYFPIFNVADASLSVGVVLMLVYVFVDDRKTKGIK

SEQ ID NO: 1847 - protein, 427 aa, Listeria monocytogenes
MQKFFNKVFRLNEHKTNIRTEFLAGMIGFFTVAYIIVVNSSILAEAGVPYQGAVLATIFISAFGCLIMGFWANAPLILMPGMGINALFAYTLVQGMGLSWQVALAAVTMSGLLFMILAFTPLAGKLNEAIPLILKQAITVGLGLFLIFLGLEKGGIVTRGKHAIIAVGDLGDPFVLATLVTLLLTMILVIRKIPGAFLWSLIIGTIVGVMFGVAGKAGGASISVAPWSDVLFKADFSGIASVGFWSAVFTMTMVIVFETVGLTNGQVRQLKQTEKLPRILKASSLTAFLSGLFGTSPTISALESGSMFASGAKTGLATITTGLFFIASLFLMPVLSFIPNSAIAPILIIIGMSMLQEFKEMDLSNAAETFSALLIIVLIPLTYSIADGIAAGFIAYPILRAFTKNEERTSPVMYVIAALFLLQFIIQ

SEQ ID NO: 1848 - protein, 456 aa, Listeria monocytogenes
LQQTVTYGAKWKQFLTIFTPIVITQLTLFSMTFFDTTMSGNYSNQALAGVAIGSSFWAPVNAAFSGLLMAITPIIAQLIGAKKEKQVKNTVHNGLYIALFLAFILILINFLVVPMILTHMPVTAEVADIARHFLNGICIGIPAFFISAILRSFIDSLGLTRVTMLITLCTVPFNIFLNYCFIFGNFGFPEMGGAGSGYATGITYWLVVLVSVILIQTQTRLRKFGVFKGLTALRFSKIKEIIGIGVPNGLTILFETSIFSAVTILMGAFGTETIAAHQSANSVCTLLYAFPLSVASTLTILGGYETGAKRLKDAKQYRHIGMAAAILIGCVNGAILFFFRDIIAGFYTNDPALSNLIMHFLVYAILFQFADAVLSPVLGALRGYKDVTVTSIVAFISYWLIGLPVGYGLSFTNLGPFGYWIGLSTGLFVAAFILSIRVRKTEQKLSFNTKDAEISN

SEQ ID NO: 1849 - protein, 310 aa, Listeria monocytogenes [sequence omitted]

SEQ ID NO: 1850 - protein, 280 aa, Listeria monocytogenes
LLFLEGLMQYSFLQKALITSVTVGIVSGVIGSFIILRGMSLMGDAISHAVLPGVAISYMMGMNFFIGAATFGIAAALGIGFVNQKSRIKNDTAIGIVFSAFFALGIILISFAKSSTDLYHILFGNVLAVRSSDMWMTIIIAIIVISLVALFYKEFLVSSFDPVMAEAYGLNVKFLHYFLMLLLTLVTVSALQTVGIILVVAMLITPAATAYLLTNKLSKMIVLASTFGAVSAIIGLYFSYIFNLASGAAMVLVATIIFFIAFLFAPKQGLLFSKKREVIE

SEQ ID NO: 1851 - protein, 240 aa, Listeria monocytogenes
MEIQGLTIAYKQKVAIDNVTLQIASGKLTGIVGPNGAGKSTLLKGMMGLIPREQGQVTLADKPLTYWRKKIAYVPQRSEVDLTFPITVFDMVLLGTYPALGLIKRPGKKEKQLALDALEQVEMTGFMKRQIGELSGGQLQRVFIARALAQHAEIFFLDEPFAGIDMTSEALIMRLLKKLRDNGKTIVVVHHDFHKVAAYFDDIILLNKKLVAHGPVEQTFTEEKIQFAYGDAPVAFAAGV

SEQ ID NO: 1852 - protein, 201 aa, Listeria monocytogenes
VDNSVNQEELAMLELARSGDTEALEYFFSKYQSVIYWKSTQYFLQGAERDDLIQEAMIGLFKAIRDYDKTKEASFRSFAEMCINRQLLSAVKRASRQKNIPLNNSVSLDTPMAEDDVDWTLLDVISEKAAETPEDFLIKNEDLTHVARQLEQVTSEFEKEVLKQYLEGKSYQEMALFFNKKEKAIDNALQRVKKKMMKQLE

SEQ ID NO: 1853 - protein, 170 aa, Listeria monocytogenes
MEQILLVDGYNVIGAWPELSYLKDRDLEAARDKLVEWMAEYQSYTGYRVVVVFDAQFVRGVKRKSKKYQVEVVFTHEDETADEYIEQKAIEWKNVRTQIMVATSDYTEQWAIFGQGALRISSRELLFEIQEMSKQIGKKIKRIQEEMPKSNLNLDSDVISQLEKWRRGEE

SEQ ID NO: 1854 - protein, 251 aa, Listeria monocytogenes
MEQENEQEWIGGRNPVLEVLRSDRDIHKIYVQEGSQKGVLKQVLTLAKERKIQVQFVPKQKIEKVVSGAHQGVAAQVAAYQYAELDDLFAAAEAKDEMPFFIILDELEDPHNLGSIMRTADSVGAHGIIIPKRRSVGLTQTVAKASTGAMEYVPVVRVTNMVRTMEELQKRGLWIFGTDAKGSSDYRTMDVDMPLAIVIGSEGFGMSRLVREKCDFLVHLPMRGKVTSLNASVAASLLLYEVYRKRFPLEK

SEQ ID NO: 1855 - protein, 136 aa, Listeria monocytogenes
MAEVKEYKQLNGLALAYMGDAVYEKFIREYLLAAGKTKPNQLHKTATKFVSAKGQAVALKAMIAEGFLTEEEDRIAKRGRNAKSYTVPKNTDPGTYSMSTSFEAVLGYLYLAGEMERLQEWMEKALEIVEKGVETN

SEQ ID NO: 1856 - protein, 471 aa, Listeria monocytogenes
LSIQIFNTLKREKQPFKPLKDGEVKMYVCGPTVYNYIHIGNARPIIVFDTVRRYFTYRGYDVKFVSNFTDVDDKLIRAANELKLTVPEVADRFIGAYFDDVDQLNVAKASVNPRVTENMDEIIQMISTLIEKGYAYESAGDVYFQTKKFKDYGKLSGQELSELQHGARVEYNERKQDELDFTLWKAAKPGEIFWESPFGNGRPGWHIECSALAKKYLGDTIDIHAGGQDLVFPHHEDEIAQSEAATGKTFANYWMHNAFLNIDGEKMSKSLGNFITLHDVLKDNDPNVIRFFMLSVHYRKPITLNDAILEDAKNGLERLMIAYQNIDHRIQTDDGEYVEEAHEDEWLEQLTELKQAFEDDMDDDFNTANAITTFHELAKRANIYLAKETVSINVLREFLSMMRLFAEVLGLKLENTQTDSLDDSEVEALIEERLQARNERNFARADEIRDILKEKNIILEDTAQGTRFRRG

SEQ ID NO: 1857 - protein, 277 aa, Listeria monocytogenes
MLKINTTTFNPQILYIANCYTNEVRVGENHHHDFLEISIICEGNVIYDIEGERVKLGKGDMLIFNPGVSHYDITEPGMTNAQLHIGFRNFALEGYTRNTFPFKKAFLRKKEEESAILSISKQIIEEKDAGKPGYDLILKAFVMQLIIHVLREATPEQLENNGVKLSTDEQQKQILVNEIIHYMEKHHTEDVSLSTLSQTMYISPAYISKVFKEETGESPINYLIKIRLTRAEELLKNKDVSVKQAANMVGYNDAYYFSKLFKKYYGFPPSENWRKSS

SEQ ID NO: 1858 - protein, 204 aa, Listeria monocytogenes
MPTRLKEDIATIIKNDPATKSFFDAFLTNPGLHALWWHRVANFFYRHKMVLFGKVLSQNARFWTNIEIHPGATIGRRLFIDHGAGIVIGETAEIGDDVTIFHGVTLGGTGKDCGKRHPTVGDGALVSAGAKVLGPVEIGAGARIGAGAVVLKDVPPGATVVGIPAKVVRLNGRTVGHAVPKMDELTLRIAELENIVEKLLKEKE

SEQ ID NO: 1859 - protein, 491 aa, Listeria monocytogenes
VSETKRVRVRYAPSPTGFLHIGNARTALFNYLFARHNDGDFIIRIEDTDAKRNIADGEESQMTNLKWLGMDWDEGVDVPGKYGPYRQSERQSIYEPLIQELLDKDLAYKCYCTEEELDAEREKQKANGEMPRYSGKCRHLTKEQQAEKEAQGFKPSIRFKVPANETITFNDMVKDDVSFESNGIGDFVIAKKDGIPTYNFAVAVDDHLMEISHVLRGDDHISNTPKQILIYNAFGWEPPIFGHMTLIVNESRRKLSKRDGSIIQFIEQYRDLGYLPEALFNFIAMLGWSPEGEEEIFSKEEFIKMFDPKRLSKSPALFDNVKLTWVNNQYVKKLPLNDVVELSLPHLQKAGVVSAELNQAELDWVHKLVSLYHEQMSYGAEIVPLSEMFFADAESITFDEEETAVLAEETVPTVISAFKKELEALEVLEAAEVKAAIKRVQKETGVKGKGLFMPIRIVTTGEMHGPELPLAIEVLGREKVLNRLDTWLKNN

SEQ ID NO: 1860 - protein, 157 aa, Listeria monocytogenes
MIRIGQGYDVHKLAYDRDLIIGGVKIPYEKGLLGHSDADVLLHAITDAIIGAIGAGDIGHFFPDTDMVFKDADSAELLAEIWQKVEADGFRLGNLDATIIAEKPKMAPYVEQMKLRIAELLHADSAQVNVKATTTEKLGFTGREEGIASLAVVLLEK

SEQ ID NO: 1861 - protein, 144 aa, Listeria monocytogenes
MEQWTVKEMAAYVGISADTLRYYEKNKIIVPNRLENGYRVYNTEHLLELKFILVMKYARFSLSEIKLMMEWLRSEPSVACNTASKELLALKAAEIKQTIAHYTKIAALLEELPQIDEVQDYSTVQKDVNTFVEHIFTDIRKDGF

SEQ ID NO: 1862 - protein, 195 aa, Listeria monocytogenes
MAKVVAIIGDPREKGTSRDLFQKYLSFFQEHPTIEVKIYDIRELAFDPNLPEGYRTEQTPEIIALKNDVHSADLLLFSYPVWWFNVPAVLKGVIDHLFWRGESYSFKDKKYFLTGPWRKKRARLIYTIGGMEIQHRLFGRPALTALRYPLWMSGVFSVKVTSIDRLDLSIRRTDNYYNKKVTHAAKKDIQFLLKK

SEQ ID NO: 1863 - protein, 238 aa, Listeria monocytogenes
MKITTKHSYWQITTFPHLFPVNCYLVLERDGLTLIDTGILAHAKGIISLIHKLKSPLKRILLTHAHGDHIGGLIAVKAAFPEALVMIGSREKLLVETKEIYAFEAQKPLKGSYSDRLPVRIDQILKDGDMVGSLLIIDTPGHTPGSISFFDERNGHLFVGDLFQTRGGAAICGEKRWLFPFPAMGSWDLPTSIASAENLQLFDVTEIACGHGPVKAMADFDLTNVLKRAKEQVTNEKD

SEQ ID NO: 1864 - protein, 129 aa, Listeria monocytogenes
MAIFGTPDEKETKKSERQKEREAYVQEENDQKRIGQRWQDIQVSTGPINVNHDILTVVFAKSVRPRIKSDPEAYLETVGFENLLQELQKKALDAGGNGLIHCSFTEQFVDGLVYQLAYGTAVNIKITRF

SEQ ID NO: 1865 - protein, 245 aa, Listeria monocytogenes
MKIDILSIFPDMFSGVTGNSIIKKAIENERVAVEVTDFREYAEGKHHIVDDYPYGGGAGMLLKAQPIFDAVQAVKEKQPETKPRVILMDPAGKRFNQKMAEEFAEEEHLVFICGHYEGYDERIREHLVTDEVSIGDYILTGGEIGAMIVMDSVIRLLPGVLGNKDSAVTDSFSTGLLEHPHYTRPADFRGMKVPDILLSGNHAWIEEWRDKESLKRTYERRPDLLKNYPLTDKQKTWLKEWSDSK

SEQ ID NO: 1866 - protein, 172 aa, Listeria monocytogenes
MEKMYNVGKIVNTHGLIGEIRVIATTDFPEERFQVGNTVYLFEKNSKKPEKLIIRSHRKHKNFDLLMFEGFTGIHQVERMKEGVLKIKETQLTNLEENEFYFHEIIGCTVVTTDGEELGEITEILTPGANDVWVVKGADKKEKLIPYIADVVKEINIDDQKITIEVMEGLLD

SEQ ID NO: 1867 - protein, 128 aa, Listeria monocytogenes
VEIIQKVVVKQILTEASKQELIEYYTEQKRQIEQECDQLHFEQKKMERKSKFQPERVADYFTHELDIRREKKKLIQFQMEQLEVLELGSEIREREMETIIDVQVGDKWDKSIFDKTIVVKDGIIVEIR

SEQ ID NO: 1868 - protein, 244 aa, Listeria monocytogenes
MKPVIGITGNRLVKGVDVFYGHRVTYTQQRYVDAIQKVGGFPIALPIDDPSVAVQAISLVDGLLLTGGQDITPQFYLEEPSQEIGAYFPPRDSYEIALVRAALDAGKPIFAICRGMQLVNVALGGSLYQDISQVETKALQHLQRVDEQLGSHTIDIEPTSELAKHHPNKKLVNSLHHQFIKKLAPSFKVTARTADGMIEAVEGDNLPSWYLGVQWHPELMFQTDPESEQLFQALVDESKKTMVK

SEQ ID NO: 1869 - protein, 90 aa, Listeria monocytogenes
MAVKIRLKRIGSKKKPFYRIVVADSRFPRDGRSIETIGTYNPLLDPVEVKIDEEATLKWMHNGAKPSDTVRNLLSREGIMEKFHNQKLGK

SEQ ID NO: 1870 - protein, 157 aa, Listeria monocytogenes
LFIYIDTLGNKVTIYFEAQENNPDDVLIIPKTKDGWLFTEHKIRGLEFPGGKGEPGETNLDAAKRELMEETGAISAELHFVADYLVESEERTFTKRVYAAHVISIESLDDYLETKGPVIIQGELSQFILQPAFSFFMRDAGMIQIVQQAEHILNDKN

SEQ ID NO: 1871 - protein, 80 aa, Listeria monocytogenes
LGMPLEVNTMIVTKGKEKRISDNFFELEKLGYRIYPIDVPIAVRKTKEGETLGEAIPRKLVWENNKTIIKYELIALNSSN

SEQ ID NO: 1872 - protein, 302 aa, Listeria monocytogenes
LKRKVGIIGTGHVGSDVAFSLVTQGICDEIVLIDKIETKAESEALELRDMASMTNSYTMITSNDWSALGDADVIVMAVGPETLLREDRMEELVETSRSVAEIVPKIIASGFQGIFVNITNPCDVITMLIQKLSGFDHSRVFGTGTSLDTARMRRVVGEALHINPKSVEGYVLGEHGESQFVAWSTVKIGGVSIKDYKTTTSLDLPALKDAVRGGGWNILTGKGWTSFGIATAVAGIVDAILTDAKQVFPLAVFSEKTSTYIGQPALIGANGVIDILEPPLTETEKINFNESAEIIKNAFQLI

SEQ ID NO: 1873 - protein, 580 aa, Listeria monocytogenes
MESMKWIWQYVRKYRLLMIGVFILIFIASGISIIYPLLGGKVIDDVVYQNKTNLLIPLLLIMIISTIIRTICRYTYQIMCERIGQNSLFRIREDLYKKLQSLDFDFFNNTRVGDIMARMTGDTDAIRHFVSWVSYNILENVFLFSFAIIIMATIDWKLTLALVIVTPLIAVLTMKMSSKAQPVFYEIRESFSRLNSMVEENISGNRVVKAFAREDFEMKKFHEHNEDFKKRNLDSADVSRTYLPVLDSLAGMLVVITLIFGGYLVIKGQMTLGDLVAFNGFLWMLNGPMRMSGWLINDVQRFIASSFKIQDMMVTDAKIPIHAEKPAPSLQGHVEFKNVSFHFEDDPNTDVLKNISLKASPGQTIAILGETGAGKSTLVNLICRFYDPTSGEILIDGVDARKWHVRELRNHIATVMQDIFLFSDTIEGNIAFGAPDATMEDVRRMARIADADHFIETMPESYDTIVGERGVGLSGGQKQRISLARALLKNPSILILDDTTSAVDMETEVKIQGELKKITENTTTFIIAHRISSVKEADEILILNHGEIIERGTHTSLLAEKGYYFDIYNKQLGTEANVNG

SEQ ID NO: 1874 - protein, 100 aa, Listeria monocytogenes
MSLIPLSLIIFLGFLAVLCLFDFVFRLYWFKYFLATMGLIASGVVFFISFYGGGMSQTEIAIAIFIGSFGEYVVSLIISLVRFISRKSKKPKQKKKAKTA

SEQ ID NO: 1875 - protein, 313 aa, Listeria monocytogenes
MNILFTLEVPEYLQTLQAEKFPEDTFYYESNDHFANLAEIDIIVTYGSNITKAKIKQASNLKLIMVFSAGVDSLPREIIQERKIKVANVRGIHAIPMGEFALSFMLAHVKKAAFFYQMQKEKNWASEEPITELAGKTLVVAGTGAIGAKVAEFAQAFDMEIIGVNTTGHPAKPFSETYAMTNIEKVAPLADFFVSVLPHTDETMGIYSLSFFEKMKNNAVFINIGRGSAVELNVLEKASKDQLIAHFYLDVLSEEPLSEDNSLWQANNVTITPHVSGHSDKYLERSFEIWFENINHLKENTKLRNEIDLNKGY

SEQ ID NO: 1876 - protein, 432 aa, Listeria monocytogenes
MDHSMSKKLHDEALLHIVGGVNSPSRSNKGVGGGIPVTMERASGAYFYDVDGNKYIDYLAAFGPIITGHAHPHITEAITKAAQNGVLYGTPTKHEITFAKMLKEAIPSLEKVRFTNSGTEAVMTTIRVARAYTGRDKIIKFAGCYHGHFDLVLVEAGSGPSTLGIPDSAGVTKSTAEEVITVPFNDLDSFKEALAIWGDQVAAVLVEPIVGNFGMVAPEDGFLEAVNELAHVNGSLVIYDEVITAFRFMYGGAQNYLGVIPDLTAMGKIIGGGLPIGAYGGRIDIMEKVAPLGPAYQAGTHAGNPASILSGIACLEVLQEEGLYERFEKYGSMLKDGIEKAAAKHNIAVTVNQIVGALTVYFTEDPVTNYAEAGATNGELFGRFFKGMLEEGINLAPSKYEAWFITSAHSEADILETIQAVDTVFGKMVQDN

SEQ ID NO: 1877 - protein, 362 aa, Listeria monocytogenes
MKFGARILKTGIAITLALFIAQLCNSPSPSLAGISAVFAIQPSIYRSYRTILERAQGNVIGAIIAIIFGLYIGNDFILIGVASIICVALLMQFRLENTIGLAVVTLIIVMDSPGNDFLEIALIRFGTIMLGLLAAFIVNLFFLPPKYEVSLFQLIYNTNSEIVRWIKLNLRHAADFPLLKKDMEWMQKQLNQTRNLYGLYREERTFLKKNAISKGRKIAVYRQMLLCSQKGFELLKIQHRYENDYLQLPPDKQELIRQHIDYLTDKHEQLLLTYIDKVSIDLEYVESHLAQDPQDLMQLFLREMRETEKDEYEDMMDKYHLMRIIASVFAYQETIDYLEKLIHSFKLRHTKENQIDINVNEE

SEQ ID NO: 1878 - protein, 175 aa, Listeria monocytogenes
MYLPKEKEIIQIKSYKHNGKLHRTWKKTVVLKSTENIIIGGNDHTLVVEADGRKWVTREPSICYFHSDYWFNVISMIREDGIYHYCNLGTPFAVDEQALKYIDYDLDIKVFPDGRFHLLDEGEYEQHRRQMKYPDSIDRILRHNVDVLSHWILDKKGPFSPDYIDIWYEKYKEYR

SEQ ID NO: 1879 - protein, 248 aa, Listeria monocytogenes
MNKVALVTGSSRGLGREIAIALAKEGYDIAVNFSRNRKKAEEVQQEIEQLGRKCVIFKANVGDVEKVRELFKAVDEEFGRLDIFINNAASGVLRPLMELEESHWDWTMNINAKALLFAGQEAAKLMQRHQSGKIISLSSIGSIRYLENYTTVGVSKAAVESLTRYLAVELAPFGIAVNAVSGGLIETDALNHFPNREELLKDAVSKTPAGRMIEPNDLVNAVLFLASEKADMIRGQTILVDGGRTLLV

SEQ ID NO: 1880 - protein, 365 aa, Listeria monocytogenes
MRKMKRLTWDETKITAFQEALVSWYEANKRVLPWRENTEPYRIWVSEIMLQQTKVDTVIPYFNRFMTQFPTMESFVNADEADILKAWEGLGYYSRVRNLQTAMKQVMADFSGEVPTDLTTILSLKGVGPYTAGAILSIAYNQAEPAVDGNVMRVIARVLEIGEDIMKASTRKIFEEVLYQLIDKKNPAAFNQGLMEIGALVCTPTKPMCMLCPLQPFCEAHKNGVETNYPVKIKKVKMKTKELLSIIVISEDGKIAIEKRPENGLLANMWQFPTIEISKKENDEVAKLQFLHNYGLEVLLEDEPIAHIKHVFSHLVWKMDIRVAKLQSAIPNENWYFATEEEMKRLAFPVPYQKMWQAWKDFKGE

SEQ ID NO: 1881 - protein, 326 aa, Listeria monocytogenes
LDTGTHVVMGIALGALATVDPVVAGSSQAAIGIMTATIIGSQIPDIDTVLKLKNNADYIRNHRGITHSLPMLAIWPLLISSILYLLFPAATFIHLLLWTFIAVGLHIFVDIFNAYGTQAVRPFKETWVAFGFINTFDWFIFGSHVVAIAAWLLGSPVLPTFVTLYVILALYYVARFVTQRMIKHAVQNLIPDSEEIIIASTIHFFQWRVAVTTKDHYYVGRAFKRNISIYEKFDRLPVPDNEIIRSAKKDKNLAAFISFSKVYNWRIEEKLDGTYVTFTDLRYRSNGHYPFVAVVKLDDDLKIVSSYTGWIFSTEKLYKKLAPVSI

SEQ ID NO: 1882 - protein, 593 aa, Listeria monocytogenes
MARNKFDIDEELETAFSAAHLKRILVYVKPYQKSIYITLFVILLANVATMIGPYLTKIVIDDTIPNKNMTQLFWIAVIFIVSVIVTGLCMRYRIRSITLIGQDILKDMRTAIFGHLQKLPFSYFDSRPHGKILIRVVNYINMLSDLLSNGLINLISDILSVIVTLGFMLMIDPVLTLYSLALIPVLFVIVMVIKTAQRKAYQVLSNKQSNMNAYIHESIAGIKVTQSFSREEENFEIFTEVSNEYRRSWMKAVKIQFLLWPGVQNIAVMTTCLIYFVGIKGYGVDVSTGTLIAFIGYVGNFWNPVINIGNFYNSLITATTYLERIFETMDVEPDIKDIPNAKKMPPIVGNVDFKDVYFRYEEGVDILKGINFHVDAGESIALVGPTGAGKTTIINLLSRFYNINSGEILVDGENVEEVTLRSLRSQMGVMLQDTFIFSGTIIENIRYGKLDATEEEIIAAAKVVRAHDFISGLKDGYYTEVKERGSTLSAGQRQLISFARALLADPKILILDEATSSIDTQTEILLQEGLERLLEGRTSFIIAHRLSTIKNSSRIFYIDNGRIQEAGSHEELMAQHGYYYNLYQSQFDMLQAL

SEQ ID NO: 1883 - protein, 153 aa, Listeria monocytogenes
LKVRGFEVVNEASRKFPEQTISLPIRGDKGSAGYDFFSNETVTIVPGEKHIFWTDIKSYMQEDEVLNIYVRSSIGIKKGLLLCNGTGIIDSSYYSNPGNDGNIGIAIKNFSNEPVSIEAGERVAQGVFQKYLVADTDIVANESRVGGVGSTGR

SEQ ID NO: 1884 - protein, 127 aa, Listeria monocytogenes
LKKKWIIILGIVIIVIFAIGVKFYMDEKRLNEEMMNVIYSDEAKEAFDKDLKGMDSKAFTEEGKVHSYEIVRESIRRNPMGGINVELIINNDSEMGIEYTMDKFNGQLRCGGASISEKLAKLLGIWK

SEQ ID NO: 1885 - protein, 130 aa, Listeria monocytogenes
LKKRWVIVLGITVMTIFGLGVKFYMDEEKLNTEMMNVVCSNEAKEVFNDDIKLIDTKAFTKEGLIQSYEVDKESIEPNPMGGIIVALVINKDSALKLTYTLKKNNEELKSGGASISKELTKQLGLLNGYK

SEQ ID NO: 1886 - protein, 130 aa, Listeria monocytogenes
LKKRWIIVLGITVITIFGLGVKFYMDEEKLNKEMMNVVYSDEAKQVFEFRLKAADADAFTEKGVIQSYEIDQKSIKKNPMGGINVTLIINGNPELYIKYTMNNFNGELSGGASVTSGNLDKLLGDKEGEK

SEQ ID NO: 1887 - protein, 427 aa, Listeria monocytogenes
MSQAITDQERVELAQKEYEDYKLKDKVKILKVNGNEQTIGIVSQKINNKSTGEQSYIITDKYTPPTASISERNKVKEITILYKGSTAPANGNLNVPKHPDYKDVRKDWLSNDIPTAIQITNGGGSTVTPQLKTSAETLKQTMKLYPNAQIYVYGHSLGSMNAQYAIADLDKKDIKRISGGFFYQGPNIYSNLTPKQQDTVKAINALDRLFNFIDRKDYVPIGYGIGDPTIGHLIEVESKKAGMVEQHMWGGYQFDEDGNILTDKEGSLRLAKYATAQQLASINIMRTSFSKSGGALSSSEEIFLDAAEGLAITQGMKQTIQGEIKDLKDMFDKAIENAEELWRDTLSDARDIGSHLAESEILAALAWGGATEPEIVIDTVQDCEKSLIEATKIEQEYDKLLEQINEAIKSQLKTDQELAKQIGSMYG

SEQ ID NO: 1888 - protein, 120 aa, Listeria monocytogenes
MDKQRQLLLKIENLEDDFNRKRRQLDEAMDEASQEKWRFHQELENLSEQIRYIYQKRDYDASEDLPKAYHLISSIQEEGEWMVKNAVTHLENESEEHQTLYKKQVTAYEEELHQLKKERD

SEQ ID NO: 1889 - protein, 238 aa, Listeria monocytogenes
MNPEQFQMALAEKGIELSDDQMKQFHDYFEMLVEWNEKMNLTAITDEKEVYLKHFYDSISAAFYVDFTKFDTICDVGAGAGFPSLPIKICFPHLKVSIVDSLKKRMTFLDALAEKLGLTDVHFYHDRAETFGQNKAHREKYDLVTARAVARMSVLSELCMPLVKKGGSFLVMKAAQAEQELQTAEKAIKLFGGKVEEHFSFSLPVEESERNIYVITKTKETPNKYPRKPGTPNKLPIE

SEQ ID NO: 1890 - protein, 480 aa, Listeria monocytogenes
MKKFSRFILMMAIACVAAFIFTGNGLNAKAAEEIYLIGTDTTFAPFEFEKDGEHVGIDMDILKAIAKDQNFKYEIKAMGFNAAVQALEANQVDGVIAGMSITDERKQKFDFSDPYFDSGVVMGILKDNDEIKTYDDLKGKKVAVKTGTEGYAFAEKIKDKYDFDIVVFDDSAQMYDDVKTRNSVACFDDYPVLAYGVQTGNGLKIVTEKEKGNSYGFAVNKGKNQELLEKFNAGLVNIKASGEYEKILKNYLGKNAIKENTTEKGFMGIIKSSWPALLSGLWLTIRLAVVSLIIAFIIGITFGFMKVSNSKILRGIATVYVDIFRGTPLIVQAFFFYFGIPAALDFRMPVFLAGVIALSLNAGAYMVEIVRGGIQSVDKGQMEAARSLGLPHKKAMMKVVLPQAIRMMIPSFINQFVITLKDTSIMSAIGLVELTQSGKIIMARTFESTWTWLIIGIMYLIVITILTKISDRLERRLRND

SEQ ID NO: 1891 - protein, 242 aa, Listeria monocytogenes
MTKLKVTGLKKSFGANEVLKGIDIEVKEGEVVCVIGPSGSGKSTFLRCMNNLEEITAGEVVVDDFNITDKKVDINKVRENIGMVFQHFNLFPHLSVLENITLAPVELKKMDKEAAKSNALRLLEQVGLREKAEEFPNQLSGGQKQRVAIARALAMDPDIMLFDEPTSALDPEMVGEVLGVMKELAKGGMTMMIVTHEMGFAREVGDRVIFMDGGYIVEEGKPADIFDNPTNERTISFLDKVL

SEQ ID NO: 1892 - protein, 616 aa, Listeria monocytogenes
MKKRILITIIVVCTVFSIIGGYVFFTSQKNTTSENKSAVSKNKKSIVKKEKPKQSSNNLTLGKNKEDFHLEKGFDNMQLQVERIIDRIFQSSLKNRTEIKVKPKNNPQKKQNIKPVKPIPSKPEKPEDSPSPFYDKARVMTPINNQLATLDLTVLEAKEPLIIGADVTKLQQLIATKQLSYKELAGIYLNRIKKYDQNGLNLNAITEINPTIIAEAEQLDKENTTNKSALYGMPVLLKDNIGTKELPTSAGTVALKDWVIGKDATIVENLKENGALILGKTNMSEWAAGMDEDLPNGYSGKKGQSKNPYSANLDPSGSSSGSATAATSDFAAIAIGTETNGSIITPASAQSAVGYKPSQGLVNNKGIIPLSSRFDTPGPLTRTVNDAYLTANALTNTTSNPSLSTDALKGKRIGLLADGESNEETAVIKKIKLDLQKAGATIIEGIAVGEFEQKESYDYASLINTDFKHDLNQFLQVNHSPMSTLESIIQFNQTNPTRNMKYGQAELVKAQQSTITKQQADNLASNLIQSSQNELDSVLQKDKLDAVVTIGMGGSVMFLAPIAGNPELTIPAGYDEESNQPISLTFITARNSDKILLNMGYAYEQQSQNRKSPNLK

SEQ ID NO: 1893 - protein, 223 aa, Listeria monocytogenes
MTIAKMIDHTALKPDTTKEQILTLTKEAREYGFASVCVNPTWVKLSAEQLAGAESVVCTVIGFPLGANTPEVKAFEVKDAIQNGAKEVDMVINIGALKDKDDELVERDIRAVVDVAKGKALVKVIIETCLLTDEEKVRACEIAVKAGTDFVKTSTGFSTGGATAEDIALMRKTVGPNIGVKASGGVRTKEDVEKMIEAGATRIGASAGVAIVSGEKPAKPDNY

SEQ ID NO: 1894 - protein, 315 aa, Listeria monocytogenes
MDKQKEQLSVEVARLYYQADLGQQEIATRLGVSRPTVSRLLQNAKTKGYVKIEVQDPFSNLTELAVALKEKYQLKNVTVAFSQTNDYSEITKQISQSAAEYLEEIIHDGDILGVSWGTTMYKIAQKLSPLKAEIKVVQLKGGVSHSDVNTYAAETLALFGAAYDTAPVSLPLPVVLDNPLAKQMVEADRHIKNIIELGKKANIAIFTVGTVRDEALLFRLGYFSDQEKARLKEKAVGDICSRFFTIDGEIADEKMDERTIGINLQELKQKETAILVAGGERKIKAIHGALRGGYANHFITDQFTAKQLLEQNFIN

SEQ ID NO: 1895 - protein, 138 aa, Listeria monocytogenes
MKAIFVCTHGNAAKELIQSAEMICGKQENTSFVPFEVNESAENLQVKIASEVAKLDLTEGVLFLTDLKGGTPFNVLVRLLGNFDAVELVAGVNIPLLLEAFLSRETLSLKQLANQVAETGRLGIYEYAAPLEEIEEDF

SEQ ID NO: 1896 - protein, 300 aa, Listeria monocytogenes
MYFVYDIGGTFVKFALMENNGTVKMKDKFPTTAKSAEELVAQMVEKWRPYRTEVKGIAVSCPGVVDTEKGVIYQGGSLLFMHEKNLAEMLARECHVPVVLQNDAKSAALAELWLGVAKNVHSAAILTLGSGVGGGIIMDGKLQSGYHLMAGEVSFMETSFDTKKLRGTFFGRTGSAVELIKRIASKKNLPNKKDGEHVFELINQGDEEANAIFDAYIYELASQILNIQYLIDPEIIAIGGGISAQPVVVERLNDAVAEIKAANPYHAAQPKIVTCHFQNDANLYGALYNFFLQMDAQNKR

SEQ ID NO: 1897 - protein, 331 aa, Listeria monocytogenes
VLKFDEQKVRENMEGALKLRPQINEVVDQIHHRGFSNICWLGIGGTYASAMQAVVHMKEKTALETFYENAAVFLTTGNKRVTKDTLVVISSVTGSTQEVVDAVKKCNEIGATIFGFIDKAETELANLVDHLISYPLNEQLKFFMVADRFMYLAGEFEDYGAFYQEMDQHFAKGIVEVEKAADKFGQEFALKHHQDDIHYFVGAGNQWGATYSYAMCYWEEQHWIKTKSIESHEFFHGMFEIVERDTPITIYVTEDSQRSLSERVVNFIPQICANYTVIDAKDYDMPGISAKFRGALSPFIIHAVNNRIDVHVEKINCHPMEIRRYYRQLDY

SEQ ID NO: 1898 - protein, 354 aa, Listeria monocytogenes
MKNMDYYIRSEQSVYENIIRSRKDLLQKVIQMEKVDYQAIVIFATGSSSNAAFAAQLYMSDKLAIPVYVEEPSTAGNYMLHLNKNTLYIAISQGGHSYSTIHLVKEIERQGGIVFTLTSDLRSPIAKESTRAIDLGMGLEEMPYVTLGYSATILMLNLMALELALLQEKILEEEYQAEIAELKKITAHLPQVIEKSAAWVDEHTQELMEAERVFFIGYGAAYGVAREGETKVTETIRITSFGKELEEYMHGPYIGLSERDYIIFLEPQGLLEDRAEKLKQFLQGHVKKIRTIYADAGGENADDLLLGMRTAELLTPLFMTIPVHLLSFEISKKKGINLEVSAFPEFDKITKSKI

SEQ ID NO: 1899 - protein, 273 aa, Listeria monocytogenes
MKMKSSDVLTKKDLMKVFWRSFTMEWSWNYERQSNLGYGFSMLPALNKIFKNDKDKRISSYQRHLEFYNVTPWLSTFPLGISIAMEEQSAKDKDFDTDSINNIKVALMGPLSGIGDSFFWGTLRVIATGIGTSLALQGNMLGPILFLLIFNIPAILTRYYGLFIGYNIGANFIEKIQKTGLMDKLSYGASVIGLAVVGAMVATMVNINMPMKFGSGDDAVTIQSVFDGIVPGILALGFTFFIFWLDKKGLKAHWILLLIAGIGILGAFTGLLK

SEQ ID NO: 1900 - protein, 272 aa, Listeria monocytogenes
MEQFGTAILLALAAMLANGEYLFGSSMLSRPLVTCTLAGLIMGDVQMGIIMGATLELAFVGSFSIGASIPPEIISGSILGTAFAISTGESTAVALALGIPIASLVLVVKNLCFIFVLPYFVHKADKYALEGNSRGISRMQLLGGFLSINLPIGIIVATSYLVGSPVIQNVLDAIPAFVITGLGIATGLLPAYGFALLLKLMVNKKNAVFFVFGFALAVYLKVPVTGVAIFAACLALILTGYATLKNDNGPKNTNTEPALANDGGINYEDEEF

SEQ ID NO: 1901 - protein, 155 aa, Listeria monocytogenes
MIQFLRVDHRLLHGQVAVSWFNALDVNTILVANDGVAADDFRKSAIRLAKPEAAKLVMKSIDESIEAINSGVTDKYNMLIVVESVEDAYKLIHGTNGKIPMLNLGGTKQREGTANFSKAVNLTPEEVEKLKELQKEKVDVFMQQVPNEKKVTFEA

SEQ ID NO: 1902 - protein, 233 aa, Listeria monocytogenes
MGAKKPLFEVIASEIKDSINRDEYKTGMLMPNETALQEIFSSSRTTIRRAVDLLVEEGLVVRKNGVGLYVQPKLTSQNILEMTGVMKTDTNENLKKDIKDFYIRKAGKFYAEKFGIKENELVYSIKFVQKSENGVTLDRLILPLSLYPDLQAKDFQIINIIELVNSGKYKLFELEQELQLILAGNEQIKNMHINENDPVFKLSSVFYAENEMPIAIQYHYEDAESTKYVVDFN

SEQ ID NO: 1903 - protein, 243 aa, Listeria monocytogenes
MEYKDLSPAVQSEEQLRQLIQEKVAAGETSFPSERALENELGVSRTTLRRSLDTLEKEAVIQKRNRKGIEINQKQTINILQMNSMSSQLPGEQKVEVMSQEIVAGKDEVNHFLNLSEEKPVFKLVRRRIVDNKPFSYEISFIDSTRFAGIEKIDLNNSLLYNVLEKQFAIKPTYGREELRYVSANEKLAEALKVPLNTPLFEVVSKAFDQNDEPFEYSKQYLIGNQIKYKINAKNIFDYLEDE

SEQ ID NO: 1904 - protein, 275 aa, Listeria monocytogenes
MKRDGHTHTEFCPHGTHDDVEEMILKAIELDFDEYSIVEHAPLSREFMNNTAGDKEAVTTASMAMSDLPYYFKKMNHIKKKYASDLLIHIGFEVDYLIGYEDFTRDFLDEYGPQTDDGVLSLHFLEGQGGFRSIDFSAEDYNEGIVQFYGGFEQAQLTYLEGVKQSIEADLGLFKPRRIGHISLCQKFQQFFGADTSNFSGEVMEEFQAILALVKKRDYELDFNTAGLFKSLCGETYPPKEIVTLARELKIPLVYGSDSHGVQDIGRGYNTYCQK

SEQ ID NO: 1905 - protein, 98 aa, Listeria monocytogenes
MVPADFEERVYTVVRQIPRGKVTTYGQIAYMIGFPKNARLVGATLKHSKRDQITPCHRVVNAAGRLVPGWEEQRELLLSEGVKFKENGHVKMKDHFWQ

SEQ ID NO: 1906 - protein, 343 aa, Listeria monocytogenes
MPDFSYAKITKLVVHFAGNKAREEGTEVSANVLADIGSEMNQTLASIFLEPFKKDEYYQFTHETDLDFNEVRTFAANMFVAEEEFLDESKKILEHLYSETTHPNIKSGDVWIFFIEGCVVDGDFTNGIGIFKVENKEVFLKNDFNGREFQIGYDKGITGTDLDKGCLIFNVDHDTGNKVLILDRLNRGDSVYWKDKFLSIDKITDEKFYTEGFVEVCTDYIKQREESLLDKSNFVKATTEYLAGEETLNIAEFARTTIEKPEEITEFNTMVDTFERENNVRFPETFQLDEEKREKLSKKIRKTIKLGKNISVVVKDLEQLEETDFVQGYDEEKGKNYMIVYYD

SEQ ID NO: 1907 - protein, 431 aa, Listeria monocytogenes
MDKFFKLRENKTTVRTEILAGLTTFLSMAYVLFVNPSMLATTGMELKAVFVATILASVVGSLAMGLIANYPIGLAPGMGLNAFFAYTVCAQWGIPWQTALAGVLVSGLVFICLTISGLREKIVNAIPTELKFAVGAGIGFFIAFLGLKNAGIIVPNESTIVALGDLHSGPVLLAVFGIVVTVAYMTIGWKGAIFFGMATTAVAGMLFGLIDVPTQVVSSVPSMESTFGQAIIHLPDIFTPQMLIVILTFFFIDFFDTAGTLVAVATQAGFVKDNKIPRAGRSLFSDSLATVFGAIFGTSTTTSYVESTAGVAVGGRTGLTAVVIAICFSLSLFFSPLLGVITSAVTTPALVIVGILMIGNVAHIDWTKFEVAVPSFFVILMMVLTFSIATGIAIGFIFYPITMVLKGRYKEVHPIMYVMMVLFILYFMFVV

SEQ ID NO: 1908 - protein, 190 aa, Listeria monocytogenes
MLKLYKKEQNQILYAEYWINNDKAIVHYGKVGKVGEKEETSNYLEKYENKAAFHEAFINRFVPQGYSEYPPNENFWILIQYPLKSLTGTKRDIWLKDRVTDVLNDNLGWKGLGIVDGFDIGQTANPNKQFALNIFCVVVDEEIGIKVIKSALRNNSCDYTSVKIASRPFSDDAEYTLKFSAKKKDVTFYV

SEQ ID NO: 1909 - protein, 330 aa, Listeria monocytogenes
MFGTTTIGIDLGTANILVYSKEKGIILNEPSVVALNTNDGTVLAIGQEAKEMIGKTPTSISAVRPMKDGVIADFDLTSGLLREIMRRISVSGVRKPNVVVCTPTGATSVERRAISDAVRSTGARSVVLIEEPVAAAIGADLPVAEPVANVIVDIGGGTSEIAIISYGGVVSSTSIRTGGDHMDEEIIQYIRKNYNLLIGQTTAERIKMELGYAPIEHVTQTADIRGRDLLTGLPKTIQVSSTEIQSALAETLQRILEAIRNTLELCPPELSGDIVDRGIILSGGGSLLQGFRDWLVEEIDVPVHMAPSPLESVAIGTGRSLVFADKLAKN

SEQ ID NO: 1910 - protein, 419 aa, Listeria monocytogenes
MKFSTWDINLKVRLFGEALLDISFWMVFPFLTIYFSESIGRELTSLLLIISQVLAVFTALLGGYFADNFGRKRMMSISVIGEGFGFLVFAIGALHVVDSPYLSFAGFAIASVFMAFYQPASQAMIADVVPPEHRTHIYSVFYMMINIAVVIGPILGSVLFYNFTTETLLAIVCADLLLLFLLQKFGHETAPLLVNPDLQKEVVRKSIGAVLMEQLKNYKIIFKDKIFFLYIVAGIIVSQSFMQLDLLFPLYIKEVIGASNLFAFHFTGEQLFGVIVSINGFFVAALTVVVTRWMSHFREKFVFMNSSFLYAIAIFLFGISTGPWGAICAIILFSFAELMTVGLQQTFVSQLAPEDKRAMYFSAAGLRYTLGKVIAPLAITLSTLIGYTGTFTIIGILALISGLIYYYMYSEFEKQRQVS

SEQ ID NO: 1911 - protein, 410 aa, Listeria monocytogenes
MTVFSEKLEKYAELIVKVGVNVQPEQKVVIMAPVDAAPLVRLISKYAFEVGAEDVIMDWRDEELGALRYKNAPLRVFESAPVHRVAEKTELAKEGACFISITSEDPDLLNGVDSNKIATFQKTMGGAMSEFRELMQANVVSWTVVAAASQGWAAKVFPDLTPAEQMETLWEAIFETTRINTENPVETWKNHDQTLAAKAESLNEKQFTSLHYTAPGTDLTIGLPKNHLWVGAGSKNKKGHEFMANMPTEEVFCCADKLKVEGYVSSTKPLSYAGNIIDDFKITFEKGRIVGVEAASGEEILKDLIATDEGSHYLGEVALVPDPSPISQSGILFYNTLFDENASNHLAIGSAYAFNVKGGEEMSREELEAAGVNNSLTHVDFMIGSSEMDIDGVTESGEVVPVFRKGDWAF

SEQ ID NO: 1912 - protein, 156 aa, Listeria monocytogenes
MKNYPFFKYNMNIKTFFTFIVALAILGLGLYLFITYEVLRVWQFWLLYAVFVISTINIFSTYVNGTVSINNHALFYKRGFSDKKYPFSQYMLECDTLLHGRTISFLPYYTINILNLETGKEEKIKLRNAAIVHKNGRKNFHLEIESLAEQLKKIQA

SEQ ID NO: 1913 - protein, 682 aa, Listeria monocytogenes
LEIFLYVLALLVAIFISNLLNRFVPFVSVPLIQIGLGVLIAIMPITFNLQLNPELFLVMFIAPLLFNDGRQTDKAALWGMRMPILVLALGLVFATVVVIGYFVHWMIPTIPLAAAFALAAALAPTDAVAVSSLSGRINLPKRIMNLLEGEALINDASGLVAFQFAIAAMVTGVFSLMDASISFFVIAIGGILVGLILSWLKFRLLKWVRGLGMEDVTFHMLIQILTPFIIYLAAEEIHVSGILAVVAAGIMHSMEQKKMDPQLVKLNVVSQSTWSVIIFVLNGLVFLLLGTQLPAITEVVWNDSGSSNLQVMAYILSITAALILLRFIWVYISWSIGAKQRQKQNKKTQLPKFRPVVLTSLSGVRGAVTLASALAIPFFLDDGSLFPQRSLIIFIASGVILCTLVIATFILPLLAKSEEVTTEDERAEIATRIRILRNVIRELKEQTLPETKAATDEVIEDYRKRIYDLQQNNSSNRGMDERERAKRLEIIQWERENTQKMTDEGRIVATDSYRYQHYLNMMEQAIKQRFRTKVKTAWMFLYRLIMLVIHPKKWGRITHKVKKGISKDSERFQAIRQLREDNEILIISKLKEQLTKENVDIIGPLITEHTIFLERVRKEHSPRGKRAKFEQKKREVQVVAFQLERDIIQNMFEKGGISRELARDLRQNLNMIETYLYDDFLE

SEQ ID NO: 1914 - protein, 212 aa, Listeria monocytogenes
MEQPSVDELKNWRNVMLLHRFALEEVNTKLKILNEEFQFIHDYNPMEHLKSRVKSLESIGAKLEKKKVDITPENALKYVHDIAGIRITCSFVSDIFRIHEMLAGQSDITIKRVKDYVTNPKPNGYRSLHLLCEVPVFLTNRSEIMTVEIQIRTVAMDFWASLEHKIYYKYQQEAPVELVNELQDAARIITHLDEKMKNLNDQIDKYKKEKEN

SEQ ID NO: 1915 - protein, 116 aa, Listeria monocytogenes
MYITFTDSAKNRLAALRSNLEGRLHLYYDTEGCSCENSGIFTLRLVEEKTAEDDEIQSNIGPVLIKRWTEMFLEEALTIDYNETEKTMILKSDGQYYNRNLLLVTDKDEVISCPIS

SEQ ID NO: 1916 - protein, 253 aa, Listeria monocytogenes
MTAYPQFDVILKALNLSSVGVIITDPEQKDNPIIFVNTGFENITGYAKEEALGSNCHFLQGDDTDKEEVAKIRHAINEKSTANVLLKNYRKDGTSFMNELTIEPIYDDHEHLYFVGIQKDVTTEHDYQLELEKSLTEIEKLSTPIVPIKENICVLPLIGSLTHDRFQHMSEYVSEYMDHGKEDYLIMDLSGLAEFNEDAVMNLVKFHGFMKLTGVELIITGISPKFAMTLIRYEENLASLTTYSTIKEALQFY

SEQ ID NO: 1917 - protein, 436 aa, Listeria monocytogenes
MAKPVVAIVGRPNVGKSTIFNRIVGERVSIVEDVPGVTRDRIYNSAEWLGKEFNIIDTGGIDLSDEPFLEQIRAQAEIAIDEADVIIFITNGREGVTDADEQVAKILYRSNKPIVLAINKVDNPEMRDQIYDFYSLGFGEPYPISGSHGLGLGDMLDAVRAHFPKEEEEEYPDDTVKFSLIGRPNVGKSSILNALLGEDRVIVSDIAGTTRDAIDTTYTFDGQDYVMIDTAGMRKRGKVYESTEKYSVLRAMRAIERSDVVLVVINAEEGIREQDKRIAGYAHDAGRAIIIVVNKWDAINKDEKTINVWTEDIREQFQFLSYAPIVFVSAKTKQRLNNLFPLINQVSDNHSLRVQSSMLNDVISDAVAMNPSPMDKGKRLKIFYTTQVAVKPPTFVVFVNDPELMHFSYERFLENRIREAFPFEGTPIRVIARKRK

SEQ ID NO: 1918 - protein, 338 aa, Listeria monocytogenes
MTQKKVAILGAGSWGTGLALVLADNNHKPVIWGNLDKIVNEINESHTNSHYLPDIILPTEVKATLSLDEAIDGAEIVVIAIPTNAMRIVCKQLNEALKEPTILVHVSKGIEPETNLRMSEVIEEEIDAAKRKALVVLSGPSHAEEVALRHPTTLCASCKDLSAAEIVQDRFINNNLRIYTNDDVIGAEIGGALKNIIALGAGISDGLGYGDNAKAALMTRGMAEITRLGVAVGSNPQTFYGLTGIGDLIVTCTSVHSRNWRAGNMLGKGENLDEVLEKMGMVVEGVRTAKAVHGWAKKLDIDMPITESIYAILFENKDAREAVDLLMGREKKIEKESF

SEQ ID NO: 1919 - protein, 326 aa, Listeria monocytogenes
MEVTRTDKAVTLTWNKEEVSEGTVVFVSSSPKLEANSEPVFKVTNDVDHYSYDTKDIPIYFFLETPNGDKAIVSERILPLESVFNFRDMGGYASKNGKHVKWGKLYRSSNLVNINENDAALLQKLHIKWICDLRSSSEVKAQPTPAIEGILNKHIPIGTAKNEETKLPVTNDTTIYEPLMGESYRVFVQSVEGFREIFTEVLEDAKAGLPFVFHCTAGKDRTGVLGALLLTLLDVPEKTIFDDYAITNRYQDDILQEMGGIVSLFSSGTEKIDLETFRPMAEARPEYLEIAFDEMKKQYGSVANYLEKGIGITATEKAAFQKEMLE

SEQ ID NO: 1920 - protein, 91 aa, Listeria monocytogenes
MANKTDLVNSVAELADLSKKDAAKAVEAVFETIQTSLSKGEKVQLIGFGNFEVRERAARKGRNPRTKEEIDIPASKVPAFKPGKALKEAVK

SEQ ID NO: 1921 - protein, 189 aa, Listeria monocytogenes
MEQIDKQKIADAVKVILEAVGENPDREGLIDTPMRVARMYEEVFAGLKKDPSVHFDTIFEEQHEELVLVKDIRFSSMCEHHLVPFFGVAHVAYLPQNGRVAGLSKLARVVDDVSRRPQLQERITTTVAEIMMEKLKPLGVMVIMEAEHMCMTIRGVNKPGTKTITSAVRGAFKNDDKLRSEVLALIKHN

SEQ ID NO: 1922 - protein, 255 aa, Listeria monocytogenes
MTYQAREAGLKEVEQLVHEQAVYQYLQENNEGGQMDKDQMLFLHEAISGSDLTDAAAYRVVSATLYMILAHDTHEKIDEPGDVVKLTRKEQELTVLAGDFYSALYYRTLAELEMIPLLRALQSGVQETNTAKTNIYQLHVATDEEYLSQLTLTNAAIFAKFAKYFMKDETFIALGCQFFLLKRLQTELATYKEIGASRLKRAFDHGYFAKEAVSNFESWLVAIIRDVKSEVERLKTEAEPLSNLLEKRIIEVIND

SEQ ID NO: 1923 - protein, 237 aa, Listeria monocytogenes
MTETKEEKVHKVFEKISPSYDRMNSVISFKLHVKWRKETMKLMRVQKGTNVLDVCCGTADWSIMMAEEIGPEGHVTGLDFSENMLKVGREKVKEADLHNVELIHGNAMELPFPDNSFDYVTIGFGLRNVPDYMQVLREMYRVLKPGGQLACIDTSQPNIPGWKQVFNAYFRYVMPVFGKFFAKSYKEYSWLQESTREFPGMARLAEMFQEAGFSYVRYISHSGGASATHFGFKKKEQ

SEQ ID NO: 1924 - protein, 321 aa, Listeria monocytogenes
MKLNFLYANMQKDIDSVEKELKKALSGAAADTTSAAALHLLEAGGKRIRPMFVCLSARLAANADFNAVKNASVAIELIHMASIVHDDVVDDADLRRGRETIKSKWGNHIAMYTGDFLFAKSLEYMTEIKDVAAHKMLSHVTVELSTGEIEQLKDKYNFDQSVRNYLRRIKRKTALLIAASCGLGGVVSGQSEADYQKLYRFGYYVGMAFQITDDVLDFVGTEKELGKPAGEDLRQGNVTLPVFFAMEDPFLKKRISQITEETPAEEIAVLVEEVKKTGAKQAEDVATTYLKKAVEILDSLPQVPELKPLKQIVRVLDKRNY

SEQ ID NO: 1925 - protein, 147 aa, Listeria monocytogenes
MEQTYVMVKPDGVERGLIGEIVTRIEKKGLKIVAGKLMQIDRELAEKHYAEHIGKSFFEDLIGFITSGPVFAMVLEGDDAIATARRMMGKTNPLEADPGTIRADYAIHTNRNVIHGSDSPESAQREIQLFFAPDEILSYQKAVDTWI

SEQ ID NO: 1926 - protein, 756 aa, Listeria monocytogenes
MKKLFSITSVVLLVLSLVVVSIGAEPKRAKAAENVPQYRNVMYYGDWSIWGGEGNFYPKDIPADQLTHLNFAFLDFNSNGDLVFTDKDAAVGAPVGQEGVQWGGANAGVLNAIQDLRAQNPNLKIGVSVGGWSKSGDFSTVAADPTKRANFVKNVMKFVKYTNMDFVDLDWEYPASVRDADLVDNKNDEGTPNAKPADKQNFITLLQDLRTALDKQGVDINKKYELSVALPAAKSTLENGIDVANLFKVVDFANVMTYDLNGAWTPNSAHHTALYGNPKDPNYDSGFSVDQTVKYLKEKGAVSNKIVVGAAFYTRGWNKVAAGTDTALPGLFQAAEKTNKDADGSLTYGANNENPIKTGDGGRAGGVWAYRSIDALKAKTPTLKEYWDDTAKAPYLYSKETGEFYTYDNTRSIGYKAQYVKDNNLGGMISWMQSQDKTTTSTKRDELTKAIKTGLFGTSAIPQNAITYANLNVVATVKPYSENGVGYEITITNNEKADETNEVLKSTELSFETVKLPKFYIPVKAGETLTAGDYKAGTVTTSGGNTVVDLASVYDAQQIPQGASYTFRLKSSASSVDVANISKIDLTQRMVKSSVEFGKQTIFGGGTVVPDPSDTEAPTVPKALASSNVTDKSATLTWTASTDNKAVAGYKVYRNGTEVGSVSGTTFTDSGLTAKTAYTYTVKAYDAAGNFSAASSALTVTTLDAATPPATPAWDAAKTYNKGDRVSYKGKTYEAQWWTQGNEPGAEQWGPWLLIN

SEQ ID NO: 1927 - protein, 203 aa, Listeria monocytogenes
LKSIKIDYKLVLGLVLCALLVILTYQFPRVFWYLYGAGMLFLLSFVIFNDDLKKEFSFVKGILPGIFSGIVLYIIFYIGAFIIKVMPGGLEHSVEAAFNKYSTHSLIIWLLLIVAIIPGEEIFWRGFVLKRLNHYFNPWFSNVFAALLCMVMMFPSGNFAAIIGIFVASLVWNIMYSYRPSLLMLYLSHLTFAFLLLAALPIY

SEQ ID NO: 1928 - protein, 263 aa, Listeria monocytogenes
MLEKNYKFLLWIYIFWFLGSVLLVSLHIIPPELTAVQSLFLVFTGVFAAVFFIMQYGKWLGSAITLLIFVVSTCIEWMQLSYTDEYIGSTLGGSVYGIPITMGFIWVGMVAGTHIIAREITLKINIDWIRGGIYSFIAATMVMIFEVLIEPITMQSKQLYITQNGFTILQLSDFINWWLLGLILHLMIYFILSLTDSWERLKYPDLKSEIVIVYWIIIAFFVFLSFYLDLWTSIAIIIVSNIIFTACYFFSLEKETQTKKKSE

SEQ ID NO: 1929 - protein, 490 aa, Listeria monocytogenes
LNLDSKKKIAIIGAGPGGLAAGMLLSQLGYQVNIYEKNDRIGGRTALHRMGKYSFDVGPSALTMTHVLTSLFMDCNRNILDYVSLLPINPIHTLYFKDITFPLYSDQSETKAVIQTYFPGEEDGFDRFMKENTKKMLYISPLNQFNYSSLFDFFRPTTLRAIPSLTLGRSLMDDLSRYFNSKYLRLAFSLQMRYLGMSPWDIPAAYSIIPFSEYYYGTFHPIGGQNKIVEAMQQVVTENKGKFFFNSEVTEFESNGKEITGAVLANGKTIEADYYFTNLDFIYSLTNEHPDKLDTKEYSSSAFILYLGLKTVLPFSHQSIIFPENYREFAHNTMHKKILSKDIAIHLTNPSATDNTMAPINHSSIRIMVPVPNNTSNIDWKKETPAFRQLVLETVKERLEIPDLESQIEEEYIITPIDWEKKYHVKHGAIFGLQHLWRQHGYLHPSKKSPKFKNLFVIGAGAMSGSSLPFIIENAQIATQKFLQKEKKSE

SEQ ID NO: 1930 - protein, 94 aa, Listeria monocytogenes
MHTFFFSKIEATPKIEGVITMAKAHVGDIIEFKDGLTGIVEKLNENSVIVDLTYMENFKDLGIEEKTVVNHKNYQIIHSVEEDDEVENAEETEE

SEQ ID NO: 1931 - protein, 88 aa, Listeria monocytogenes
MEQASFVVIDETGIHARPATLLVQAASKYSSDVQIEYTGKKVNLKSIMGVMSLGIGKGADITIYTEGSDEKEAIEGLTEVLKKEGLAE

SEQ ID NO: 1932 - protein, 572 aa, Listeria monocytogenes
MAKELKGIAASDGIAIAKAYLLVEPDLSYEKTEVTDVESEVKRFESALEVSRTELSMIREKAAKDLGEDKAQIFDAHLLVLNDPELTGPIEESIKNSKTNAETALQETTDMFIGMFESMDNEYMRERAADIKDVRKRVLSHLLGVTIPNPALIDEEVVVVAADLTPSDTAQLNRNFVKGFVTDIGGRTSHSAIMARSLEIPAVVGTKEVTASVAKNDIVIIDGLEGNVIIHPTEEQIAHYEKIKSDFALQQAEWDKLKNEKTVSKDGVHVELAANIGTPNDLEGVISNGGEAVGLYRTEFLYMGRDNFPTEEEQFEAYKAVVSGMDGKSVVVRTLDIGGDKTLPYLELPEEMNPFLGFRAIRLCFANEELFRTQLRALLRASVYGNLKIMFPMIATVNEFRQARDILLDEKAKLKAAGTEVSDSIELGIMIEIPAAAVLADQFAKEVDFFSIGTNDLIQYTMAADRMNERVSYLYQPYNPSILRLVKMVIDASHKEGKWTGMCGEMAGDQTAVPLLLGLGLDEFSMSASSILKSRSLIKRLDQSEMVKLAEEALNKSTAEEVVELVEKYTAE

SEQ ID NO: 1933 - protein, 344 aa, Listeria monocytogenes
LVIYLLAGFFLLLFIVLSFIDRRRISNGIILTMALFFSVLSVVYATFSKGNELLVSVMGTVLLLLVLLIPFFVVGIATMLIVNGRLMLKREGRKLANMLPLIIGLGILALIITWFGSILKTGSPILGIVVVFIVALVGYFSFLFLSFLLSTFLYQFNFPRYNQDFLIVLGSGLIGGDRVPPLLASRLNRAIKFYDKQYAKKGKRATFIVSGGQGANETISEAEAMRGYLIEQGIDENFIIMEDQSVNTLQNMKFSKAKMDAIMSNYNSLFSTNNFHLFRAGIYARKAGLKSQGIGAKTALYYMPNALIREFIAITVMYKKVHMVLLGLLLLFFAFLAIIGVTFR

SEQ ID NO: 1934 - protein, 224 aa, Listeria monocytogenes
MRKIAASIMCADQLHLGDELQRLESAGVELLHCDVMDGVYVNNLALGPEYLEIVRNNTEIPLDIHLATITPLKYIDMFGPVKPEYISFHVEVAEDVSEIIRKIRSYNVKPSIAINPETPIEAIYPYLDDVEMVLMMTVNPGFAGQKFQTDVLQKLHDLKAKLAGKIHAPLIEVDGNINKETVGLMRDCLPDIYVLGTSALFHDRDKTSYAERLVHIWSNVEKHV

SEQ ID NO: 1935 - protein, 286 aa, Listeria monocytogenes
MEKIGFVGTGVMGSSMAGHLLEAGYEVLVYTRTKTKAEDLLDKGALWVETPGELANKVDILISMVGYPKDVEELYLGENGFLENLAVGTVAIDMTTSSPALAKKMAEFGREKGIGVLDAPVSGGDIGAKNGTLSIMVGGSEDVFLKVKPIFDILGSSVILQGDAGAGQHTKMVNQIAIASNMIGVTEAIIYAEAAGLNPSRVLDSISGGAAGSWSLANLIPRVLKDDFSPGFFIKHFIKDMGIAISEAKQMGLELPGLTLAEKMYQTLAEQGLSEEGTQALIKYYR

SEQ ID NO: 1936 - protein, 381 aa, Listeria monocytogenes
MTKSIRPELRDIQVSGIRTFNTRVTGIPDMIRLTLGEPDFPTPDHVKQAAISAIEENFTNYTPNAGMPELLEAASIYFHEKYDLSYSNKEIIVTVGATEAISVALQTILEPGDEVILPDPIYPGYEPLITLNKAHPVKVDTTETNFKLTPEQLKAHITPKTKALIIPYPSNPTGVTLSKDELSALAEVLKETGIFVIADEIYSELTYHEEHVSIAPMLRDQTIVINGLSKSHAMIGWRIGFLLAPEILTQEMLKIHQYSVTCASSISQKAALEAITNGKDDAFQMRTEYKTRANFTQDRLEKMGFTVIPPDGAFYFFVKLPDEIAENSFDWAVKLAEEAKVAVVPGNAFSEKGDRYFRLSYATSFNNLAEALDRMAQFVEK

SEQ ID NO: 1937 - protein, 366 aa, Listeria monocytogenes
MHKHHLSKKLFFAGLVLFIIGAIGVAFTMNTGKMIEKGEPLTKQWDLSTENIKKIAFSSERDASIEWKESTTGKNYIELKGNYSANDKKAIQQLEPVSEDGTSFDITVPEEDDWYNGFGKIYAYGKQKVTIYLTKDTKLADLEVKSHSGDIDVADFKVKKFVSSTNSGELKVTNLEANTAQMATSSGDLTLSNIKANSSIETDSGKTELTNLTGDLEVNGGSGDVNVAGVKAKKLKIAIDSGDIELTSGTVTDLAVLTTSSGDIDANTKGKIQAESDSGSIELAGATNNVTAKTSSGDIDVAFTKQVKNIEINSDSGEVELELPGDFKAIYEASSNSGSVKAPTSDSNTDNRVTVKTSSGDIKIEK

SEQ ID NO: 1938 - protein, 166 aa, Listeria monocytogenes
MDFHIRKATNSDAEAIQHVAITSWHHTYQDLIPGDVQDDFLERFYNVETLHNRISATPFAVVEQADKVIGFANFIELEKGKSELAAFYLLPEVTQRGLGTELLEVGMTLFHVPLPMFVNVEKGNETAIHFYKAKGFVQVEEFTEDFYGYPLETIRFNLNHHAFEEE

SEQ ID NO: 1939 - protein, 128 aa, Listeria monocytogenes
MRFIIAYLSIFVLGIFSALLVETILYDNVTPQLVFSAILFAAPVILVASTLGEIFYGFSKKASYFTFAIWGFAYGVVAAVIILSIIQVSGMLISVGVSILAGVIMALLAIIFFFLRGGKSTSGKAATK

SEQ ID NO: 1940 - protein, 114 aa, Listeria monocytogenes
MLDKKIISALSYFSLFFAPVITPAIIWCTTKDKEIRHHVKWALLTQATFVAGIVVMILLYNNVPFSTNSADTINFLALATVFFIVFLNVSILIFNLIRGITRIVKHSDDNWARC

SEQ ID NO: 1941 - protein, 446 aa, Listeria monocytogenes
VSSVHKVASISLFTLAWPIFLEQFLRLMISYIDVFMLGHYSDDAVAATGVANQILVISIIIYGFISVGVQIIVAQMIGAKKHKEIENVITNGLVVAFLIGIVMSIIFIFMSKNFLTWMGIDPHLVQVGAPFLEIIGGSSVVIAIHASILPILRAHGYVRQSILVPVTISIINVVGNYLFLYGPLAYLDYGVAGVGISTAVANFVGMGLAIWMLRKYIGYTFHFKKLEQVSKKLLYSILRLGLPSAGENLSYAGSQLVVTAIIAILGTEALTTKVYASTVSQFVALFAIALGQASQIIIGRAVGAKEIDKAYKQGLRSWKIGLVVAIVVSVSIYLFAEPIMRLFTTNTEIIAMTKELFLLSIFLELGRATNIIIISSLNSTGDVRFPFICGLIVMWIVSLPFSYVLGISAGLGLVGVWLAYIIDEGVRAVLMYRRWRSKVWSLKSVI

SEQ ID NO: 1942 - protein, 123 aa, Listeria monocytogenes
VTIKITRKTGIGSGITPVKIRIENEEIVKLDNHQSHFFMPKMEKTKVCVTDWFYGSQEAVLENSNDVVVRINRKALLLNYSMFPFLFYGFVMTSLFATLIALGLCLVSFFYSRKHWFEFVKIK

SEQ ID NO: 1943 - protein, 130 aa, Listeria monocytogenes
MNWTRISSIIIVGFTAIGAIYGGLSMVFMPSGGLLSLSTGLLDGSPFVDYLVPGIFLFVFVGLFHLAALIYLLKKLPRTKEVMFAAAAVLAVWMIVQLLIIGYVFILQIIFLVVAAVEMFLAIQLKKQQR

SEQ ID NO: 1944 - protein, 69 aa, Listeria monocytogenes
MRENSIIGRIIAFCAICFAFFNPKTVTYWLGVRAESGPAWYLTTVVACGIAVFVLIDLIKKIKRRKAAE

SEQ ID NO: 1945 - protein, 325 aa, Listeria monocytogenes
MCTSITYTTKDHYFGRNFDYELSYKEVVVVTPKNYPFHFRKVEDIEKHYALIGIAAVMENYPLYYDATNEKGLSMAGLNFSGNADYKDFAEGKDNVTPFEFIPWILGQCATVKEARRLLQRINLVNISFSENLPLSPLHWLMADQTESIVVECVKDGLHIYDNPVGVLTNNPTFDYQLFNLNNYRVLSSETPENNFSKEIDLDAYSRGMGGIGLPGDLSSMSRFVKATFTKLNSVSGDSESESISQFFHILGSVEQQKGLCDVGGGKYEHTIYSSCCNIDKGIYYYRTYGNSQITGVDMHQEDLESKELAIYPLVNEQRLNIVNK

SEQ ID NO: 1946 - protein, 542 aa, Listeria monocytogenes
MAKDIKFSEDARRAMLRGVDQLANAVKVTLGPKGRNVVLEKKFGSPLITNDGVTIAKEIELEDPFENMGAKLVSEVASKTNDVAGDGTTTATVLAQAMIQEGLKNVTAGANPVGVRRGIEKAVATAIEELKAISKPIESKESIAQVAAISSGDEEVGKLIAEAMERVGNDGVITIEESKGFATELDVVEGMQFDRGYTSPYMVTDSDKMEAVLEKPYILITDKKINNIQEILPVLEQVVQQGRPMLIIAEDVEGEAQATLVLNKLRGTFNVVAVKAPGFGDRRKAMLEDIAILTGGQVITEDLGLELKTATVDQLGTANKVVVTKDDTTIVEGAGDSTQISARVNQIRAQMEETTSEFDREKLQERLAKLAGGVAVVKVGAATETELKERKLRIEDALNSTRAAVEEGIVAGGGTALVSIYNKVAALEAEGDVETGINIVLRSLEEPVRQIAHNAGLEGSVIVERLKHEAVGVGFNAANGEWVNMIDAGIVDPTKVTRSALQNASSVAALLLTTEAVVADKPDENGPAAVPDMGMGGMGGMM

SEQ ID NO: 1947 - protein, 552 aa, Listeria monocytogenes
VSIYQLDSEKFAAMIALGAENLAKNADFVDSLNVFPVPDGDTGTNMNLSMTSGAEEVAKNDKETISAVGANLAKGLLMGARGNSGVILSQLFRGFSKAIENKETLNAEEFAGAFVKGVETAYKAVMKPVEGTILTVAREAAKAGVAAANEHQDIELVMEAILKQGKVALEKTPDLLPVLKEVGVVDSGGQGLIIIYEGFYGALTGKMAEAPDYMASMGELINAEHHRHVQDFMSTEDIHFGYCTEIIVKINENKPGQKPFDEEQFRQDLSKLGDSLLVAADDEVVKVHVHVEHPGEVLNYGQQYGSLLKMKVENMREQHNEIVGDDKAPAKEKAAYGIVTVSAGEGLKKLFESMGVSVVLSGGQTMNPSTEDIVKAIESANAEQVFVLPNNKNIQMAAEQAAQILGDDKVQIIPTKTIPQGLTAVLSFQADQDFLANAEAMKAAIEDVASGQVTTAVRDTTVEGVEIKKDSFIGMVEGKIKVSCATLEEAAYETLEKLLDDDSEIVTIIVGEDSDTTKAETLADKVTEAFPDVEVEIHEGDQPVYPYIFAVE

SEQ ID NO: 1948 - protein, 220 aa, Listeria monocytogenes
VKFNSVFDIIGPVMIGPSSSHTAGASRIGAIARAVFNEQPSQVDIHLYGSFAKTYKGHGTDVALIGGLLGFEPDDPRMKESPKLAEEWGMRIQFIEEVEEPPHPNTVKLVLKHGMQQMTLIGASIGGGKVEIIRLNEFELEFTGTAPAILILHQDKFGAIAAVSSVIADHKINIGQMKVSRKVKGDEALMVIEVDQQVEQALISKIAELSGIYQVASVMI

SEQ ID NO: 1949 - protein, 296 aa, Listeria monocytogenes
MFRTVAELVDIAERENLTIAEIMIKREMNISGLPREEITAAMERNLDIMEEAIREGEAGVTSTTGLTGGDAVLMQDYIKKGNFLSGEVLLDSVAKAIATNEVNASMGVICATPTAGSAGVVPGVLFSLKDRLEMTREDMVNFLFTAGAFGYVVANNAFISGAAGGCQAEIGSASAMASAAIVAAAGGTPEQSAHAMAMTMKNMLGLVCDPVAGLVEVPCVKRNALGSSQAIISADMALAGIKSRIPCDEVIEAMHRVGLQMPSSLRETAEGGLAATPTGRAIQRKIFGLSPEDKRE

SEQ ID NO: 1950 - protein, 210 aa, Listeria monocytogenes
MTYLNNDFEDLMKNRRSIREYDETVKISQEEMKAILEDAVTAPSSVNMQPWRFVVVESDAGKEKLSSLVRFNTRQNESSSAMILVFGDLQNFENGEKIYGESVERGLMPAEVKEQQMAKLSQYFASIPRSEAERVVLIDGGIVAMQLMLVARAHGYDTNPIGGFERTEVAEAFNMDPERYVPVMIVSIGKAKNSGYQSYRLPITDVTTFA

SEQ ID NO: 1951 - protein, 682 aa, Listeria monocytogenes
VSELKRIPTTEIKGIGEETAKTLKELGLSTVHDLLWNFPYRYEDYRLRDLSEVAHEERITIQGEVLTEATVAFYGRKKSKLSFRVSTEGQVIKIDFFNQPYLKSKISVGETVTISGKWDKSRAQVTASKIKIGAVESEEELEGVYRLKGTLRNKTMQKYTRLAFDSYSQDIEEVIPGNLLEKYQLMDRLEAVRILHFPKNNEELKQARRRMVYEEFLLFQLKMQFFRKIEREKSGGISINYDVEDLRHYIDSLPFPLTKAQKRVVNEICGDMLSHFHMNRLLQGDVGSGKTVVASIAMYAAAKSGFQSALMVPTEILAEQHANSLVELLQPFDITVGLLTSSVKGKQRRELLAMLENGSIDVLIGTHALIQDEVIYHRLGLVITDEQHRFGVAQRRVLREKGEYPDVLFMTATPIPRTLAITAFGEMDVSIIDELPAGRKEIETYWVKHQMLDRVIGFMEKEIDKGHQVYIICPLIEESEKLDVQNAIDVFNILQNKWGTKYIPGLMHGKLLPADKEQIMRDFNDKKIDCLVSTTVVEVGVNVPNATMMVIYDADRFGLAQLHQLRGRVGRGVDQSYCILIADPKTEVGKERMMIMSETNDGFVVSERDLELRGPGDFFGRKQSGVPEFKVADMVHDYRVLEIARQDAVHMIFEEDMLENKNYEKLVALLEEEGVFTEQKLD

SEQ ID NO: 1952 - protein, 541 aa, Listeria monocytogenes
MKLLKRVSFFLIILYLLIVPVQHVSAHAYLENSNPADQSHIQTAPEKVTLVFNEEIEADFPLIEVKDSSGKQVETGKTSVSKKNNHMVEASLPADLKADVYSVSWRVVSADGHAVTGIISFKLGDTKATFQASEVPSSGADLQISSIQKAILYIGFSLFIGVLVFGLGLYPRKEQISEKISGHLKKVTWIALALLGVALLIQLFVQTSITTGVSISESFGPSKLAAFLTTKTGYIWISEFVVWLLLAIFTVMMFFKKKQWGWFALLTESALIGYLIFAKAQNGHAAASADKIVSITADMLHMIAASVWVGGILVLLFVLPRTGKARKVWIRFAIVAIIAVASILVSGLLMAVMNIGQMANLFTTNYGKILLFKIGLFILMALLGLGHYIYIKLKNQQLPFKTILIELIIGTIILVVASVLTNVQTPPPSAPKAFDETIAAEGEKAKINLRVEPATVGQNQFIITFTSADGSAKTDFEQVTITTKSTKTDEKSTFQAKLANDTQYFAEGLYFNQTGKWEITVHGLTKDFTDINQTFTTNITQ

SEQ ID NO: 1953 - protein, 205 aa, Listeria monocytogenes
MKKIMSSIVVLLAVFIIPFQASAHVSVLPSESTVDSWETYTMKVPSEKDAASKKIVLKVTKGVSFESYEPVPGWTTTIDKKNGTVTWQTEGSGIEKGQFQRFSFIAKNPSEEGEVPWNAYQYYEDGSIVEWVGAEDSETPHATTKIVKESSKSATGSHGEVVAGAENTAGDTSSSGDNTILLWTAVAISVIALITGILAILSRKK

SEQ ID NO: 1954 - protein, 213 aa, Listeria monocytogenes
MERKIMHLAVGKPKELNLSNNKRMMTGIEKKLVQSAYLTTTGFENDAPHNLKYHGGPDRTVCIYPYEHYAKWTEMFGEELQVTAFGENLITTNMLESSVQIGDKFQIGETVIQITEARNPCSTIEKFNGIPNLYKAIHKTGLTGYLCRTITPGIIHATDEIKQIHQESHGVTVAFCHEKVLHKKGTKEDLERILAVEALSERYRDQVEKQIKK

SEQ ID NO: 1955 - protein, 247 aa, Listeria monocytogenes
LDKTKRKMIYETFMLILILLSLALLPYRNNFTFILNWIIWVIFTLDYLVRLYRADNKWHYVKTHPFQLIAIIPFYGGFRAARIVSFVHLLSITAMGRRYIVPIYSFFRSNGLNRFLMIFVLLVIIIPVPMVFIEPEINNYPDALWWAIVTATTVGYGDIVPVTPIGRILASIMMLFGIAFIGMITSTITNFFRAKKPTNSSTQRANKITQLISETPDLTKEEIAVVEQFLTLRKKELADENTKSDSE

SEQ ID NO: 1956 - protein, 305 aa, Listeria monocytogenes
MKKFLKVWSVLTIICMTVVVFGGALVTKTGSADGCGNSWPLCNGQLVRLTDVTPEKLIEFMHRMTTGISSIFVIVLAICAWIYMKNRRETKPLAIIAVLFLIIQALMGMAAVVWGQNPYIMALHFGISIICYASIVLLALMIFEVDRKFDARNLVMGTKLRVNIYALTIYTYLAVYTGALVRHEKASMAVPVWPFENGHFIMPTSVQDYVQYFHRLAAFILIVWLLYVTWLVFRDYRRYRVLTFSMVLSLVFIALQAVTGALSVYTGVNLYIALAHSLIITMLFALLCYLCLLASRSKSNRLRIK

SEQ ID NO: 1957 - protein, 96 aa, Listeria monocytogenes
MLHIEAQITVKKEQTEAFLQAAKEVIAASRAEAGNHGYELVQSTENETVFYMLEKWADMDAIQQHNDSEHFKKFQKAAADFVAKELEISVLTPLAR

SEQ ID NO: 1958 - protein, 283 aa, Listeria monocytogenes
MKKISMRERFALDPRVAKVLISITIAVILFPVMGDWIVYPTYVFNAIYITAQMSKGDTYKSSIERIIGTIVGGLLAAFVYLLVPNHHYIMIPIGAALAVMLSYLFTKKFTMVIVVITVMVLVGKGDGEPIVFLRDRLFDTMIGLVIGFVVYALYPRKKNKKLNQVFISQEKAVLERIKEIDINSEDAKSLAPKIKGLWKQLIDLRKTREQIITDSSFVASLTSDEPMLHFTHLVEQAINNIEILYHVTLEKESEPDYEVVFAYHQQACAKVITEMDALITKHK

SEQ ID NO: 1959 - protein, 321 aa, Listeria monocytogenes
MTETRTEKKKKTTSTFTKVMKIASVALLGIIFFSITGLAAKYYITVQNTFSKINVPLESSNKTLSDLEKKKPFSVLLMGSDARAGEKNGRADTIILATANKQQNAVEMVSIPRDTKVDYGNGDIGKINASYSNGGPSGTVSAVEKLMPGVPVDYFISINMEGFKDLVDAVGGITVYNDIDLTEVNSKFVKGNITLNGTEALQYVRIRHEDPRGDFGRQDRQRDVIIGIANKVISSSGVSNFESIMKAVGDNFQTNMTLTDITSMAANYSSVLKNVDSQELKGEGEMIYSESYGFDLYYFAPDKTDLERIITMFKKSLDITE

SEQ ID NO: 1960 - protein, 555 aa, Listeria monocytogenes
MKFVKNNETAVFALGGLGEIGKNTYGVQFQDEIILIDAGIKFPEDELLGIDYVIPDYSYLVKNKDKIKGLFITHGHEDHIGGVPYLLRDLNIPIYAGKLASALIRNKLEEHGLLRQTKIYEYEEDDVFKFRKTSISFFRTTHSIPDTYGIVVKTPSGNIVHTGDFKFDFTPVGEPANLTKMAEIGKEGVLCLLSDSTNAEVPNFTMSERVVGESIKNIFRDVEGRIIFATFASNIYRLQQVVESSIETGRKIAVFGRSMESAMEIGKQLGYIQAPKDTFIDVHQLNKTPAGNVTILCTGSQGEPMAALSRIANGTHRQIQIQPGDTVVFSSSPIPGNTTSVNRTINLLYQAGAEVIHGKVNNIHTSGHGGQQEQKLMLRLMKPKFFMPIHGEFRMQKIHAESAEECGVPEENSFIMANGDVLALTSETAHVAGKIHAASVYIDGSGIGDIGNIVLRDRRILSEEGLVIVVVSIDMKNSRVMAGPDIISRGFIYMRESGNLIGEAQGLLTRHLNKVMEQKTTQWSEIKNEITDTLQPFLYEKTKRRPMILPIIMEV

SEQ ID NO: 1961 - protein, 256 aa, Listeria monocytogenes
MSKIVFFDVDGTLVGETKEIPASAKQAIAKLKENGVYVAIATGRGPFMLDEIRKELDINSYICYNGQYVIFEGKEIYAKPLPTESLERLITVASEHEHPIVFSGKDSMRANLPDHDRVTIGMNSIKREYPKVDANYYKGRDIYQCLLFCDESYDAYYREEFKQYGFLRWHDVSVDVCPADGSKAEGIKQMIKKLGFSMKDTYAFGDGLNDIAMLQTVGTGVAMGNGRDEVKAVADYVTSHVDDDGVYNALKQLKLI

SEQ ID NO: 1962 - protein, 342 aa, Listeria monocytogenes
MKLEDIARLANVSKSAVSLALNGKAGVSEETRLHILQIVEENNYVPLRNTNKKMKKKSTIRFIACKSPNLITEQYQNLPFFSELLSYLSAEIASYPYDLVISTFDATTILEELAEAEKEQPTAGLILLGTNLNAEEINRIQQEYPKIVVLDTHHPHISANFVSINNFLGGYKAADYLLQLSHTKIGYVMGLPRIKNFDERKSGFFARLEEADISVPEEHVFHLSAMQIQEEASVKEAIAELQDLPSALFCENDYMAISMIKMLQSLSIKVPEQVSVLGFDNINESKVITPELTTVHVKKRDIAEQTLALLSKQIKADTNFETRQIQVNTSLIERTSCVPFQK

SEQ ID NO: 1963 - protein, 114 aa, Listeria monocytogenes
MFLRITIYTLIQEAIIFGILLFGKNQTVSLSNYVDISFMVALISLLIGLFVYIMRSGFLDRVHNGFRSISRKIKREEENEFSDMPLSELVGLQYAGILFSSIFVMLTSILCMFL

SEQ ID NO: 1964 - protein, 97 aa, Listeria monocytogenes
MKKLNELSKSDLLLIFQALSDPIRLDIFLCLLKSKEKRFSGTTYNISKSTMSHHIKLLKEAKLINLRKEGTTHIYSVNQELVSLISHFFEECGEKDE

SEQ ID NO: 1965 - protein, 331 aa, Listeria monocytogenes
MKKVIFSGIQPSGQLTLGNYIGALKQFGQFQDEYECFYCIVDEHAITVPQDRLKLREQTRSLAALYLAVGLDPEKSTLFIQSEVAAHAQAAWILQCNVYIGELERMTQFKDKSAGKAGVSAGLLTYPPLMAADILLYQTDLVPVGEDQKQHIELTRDLAERFNKKHADIFTMPEVFIPKQGARVMSLQDPTKKMSKSDANLKNAIFLLDPPATIRKKIKSAVTDSSGIIEYNKEEKPGVSNLLTIYSVITGETIASIEEKYVGKGYGDFKTDLAELVVSELEPIQERYYAYLKSEELDTILDAGAEKAARVANKTLKKMENGVGLGRKRRK

SEQ ID NO: 1966 - protein, 138 aa, Listeria monocytogenes
MKKLYETTVINTGGRSGEVHSPDNVFYFDISAPTELGGDGGGGTNPEQLFAAGYGACFNSALELVLGKAGIEAKSTVTATVSLYSDPEDNGFKIGVVLEGTIEGQDKEKTEALLKKAHEVCPYSKATRGNIDVEIKVG

SEQ ID NO: 1967 - protein, 150 aa, Listeria monocytogenes
LDTNTRILEEQLCFSVYNASKQFTKLYREALEPFQLTYPQYIALLVLWEVEEQTVSELGKRLALDSGTLTPMLKRMEHLGYVTRSRHPEDERRVYIRLTEKAIKIQPDVLKSVDNCLQLLDFAELDYTQLLTKIQSLTKQLGGIENEKII

SEQ ID NO: 1968 - protein, 413 aa, Listeria monocytogenes
MDKRRVVVTGVGAVTPIGNDAETSWENAKKGVNGVAKMTRLNPDDFPVKIAAELKDFDVEKYLEKKEARKMDRFTHYAIASAEMAVQDSGLVIDDSNANRVGVWIGSGIGGMETFETQYEIFLNRGHRRVSPFFVPMMIPDMGSGQVSIRFGAKGINSTTVTACATATNSIGDAFKVIERGDADAMITGGAEAPITKMSLAGFTANKALSLNPDPETACRPFDKDRDGFIIGEGAGIVILEEYEHAKARGAKIYAEIVGYGATGDAYHITAPAPNGEGAARAMKMAIDDAGLTPDKVDYINAHGTSTPYNDEYETQAIKTVFGEHAKKLAISSTKSMTGHTLGASGGIEAIFALLTIRDNIIAPTIHLKNQDEVCDLDYVPNEAREANVNVVISNSFGFGGHNATLVFKRIED

SEQ ID NO: 1969 - protein, 312 aa, Listeria monocytogenes
MNAGILGVGKYVPEKIVTNFDLEKIMDTSDEWIRTRTGIEERRIARDDEYTHDLAYEAAKVAIKNAGLTPDDIDLFIVATVTQEATFPSVANIIQDRLGAKNAAGMDVEAACAGFTFGVVTAAQFIKTGAYKNIVVVGADKLSKITNWDDRTTAVLFGDGAGAVVMGPVSDDHGLLSFDLGSDGSGGKYLNLDENKKIYMNGREVFRFAVRQMGEASLRVLERAGLEKEDLDLLIPHQANIRIMEASRERLNLPEEKLMKTVHKYGNTSSSSIALALVDAVEEGRIKDNDNVLLVGFGGGLTWGALIIRWGK

SEQ ID NO: 1970 - protein, 116 aa, Listeria monocytogenes
MKKPRIYTMSFASVYPLYIQKAEKKDRTKEEVDEIIFWLTGYDQDSLQQAIDQAIDFETFFAEAPKMNPNASLITGVICGYRVEEIEDKLMQQIRYLDKLVDELAKGKKMEKILRK

SEQ ID NO: 1971 - protein, 802 aa, Listeria monocytogenes
MLVSYNWVKEFFQDFPLTAEELGEAITRTGIEIEGVEELSASLKNVVVGEVLSCERHPDAEKLNKCLVQTDEAEPVQIICGAPNVAAGQKVIVAKVGARLPGGLKIKRAKLRGEVSEGMICSLAELGFESKVVPKAYAEGIYVLPAHVETGVNAITLLGLDDAILDMAITPNRADALSMKGVAHEVGAIIHQKPAQPTEPDVSEKGKAEDFISVEVENPAETPYYAIKMVENIEIKESPLWLQTKLMKAGIRPHNNVVDVTNYINLLYGQPLHSFDYDKIGSKKIVVRSAKEQEEITTLDGEKRTLQAGHTVITNGVEPIAIAGVMGGEFSEVTENTTTVALEGAIFSSSSIGKASRELYLRTEASIRYDKGSDAWKVEKALAHGGALIAELSGGTLVGGVVEVDNREKAVNKIETSLTRINRILGTAITLTEIETIFDRLGFVLEVKNDALIIEVPTRRWDITIEADILEEVARIYGYDEIPVTLPATSTTGGLSDSQKARRVMRAYLEGAGLNQALTYSLTSKKDATRLALSDEKTVALSMPMSEEHSHLRTSIVPQLIRSASYNIARKNMDVALYEMGTVFYATEGDNLPIEQEHLAGLITGNWHIADWQKTPKPVDFFVLKGIVEGLVNKLGIKSELHWKQTEKEELHPGRTASLVLEGQEIGYLGALHPAVEANYDLKETYVFEINVAALLDATKEKVVYHPIPRYPEMTRDLALLVDKDTNHAAISQVIKEHGGKLLVDIELFDIFEGESLGENKKSLAYTLTFLDSERTLVEEDVQKATNKVVEALQEKLNAIIR

SEQ ID NO: 1972 - protein, 350 aa, Listeria monocytogenes
MLEQLQTLKSEAETQINEASDLKTLNDLRVKYLGKKGPMTEIMKQMGKLSAEERPKMGSLANEVRTALTEAISSKQQILETEAINEKLKSETIDVTLPGTAPSIGTKHLLTQVIEEMEDMFIGMGYEIAEGPEVELDYYNFEALNLPKDHPARDMQDSFYITENTLLRTQTSPVQARTMEKHDFSKGPIKVICPGKVYRRDNDDATHSHQFTQIEGLVVGENITFADLKGTLTVLAKTMFGEEREIRLRPSFFPFTEPSVEMDISCFKCGGKGCRVCKGTGWIEILGSGMVHPNVLEMSGIDSTRYSGFAFGLGPERVAMLKYAVDDIRHLYTNDLRFTKQFQSTETGEI

SEQ ID NO: 1973 - protein, 120 aa, Listeria monocytogenes
MNKKSLIFGILAGGAIGAAASVLFAPKSGNELRKDIVAKSGEASVILKELAYNANELIQSVQVLGTEGSTLLKDVSSDIMESVSKWNEEMEPEKKRLKDEIKDMQKTISDLEKTLKKDNK

SEQ ID NO: 1974 - protein, 140 aa, Listeria monocytogenes
MDDCIFCKIVRGEIPSAKVYEDDEVYAFLDLGQVTEGHTLVIPKKHARNTFDLPDETAAELFRRVPKIARALKEALPIQGLNILNNNEEVAFQSVFHCHIHLIPRYSKSDDFGLKWKDNADWYTQERYQEIAELIAAKVD

SEQ ID NO: 1975 - protein, 250 aa, Listeria monocytogenes
MALVEVEHLTGGYTKRPVLKDISFAIEEKQIVGLIGLNGAGKSTTIKHITGLMHPKQGTIKINNHQLVEDTETYRKQFSYIPETPVLYEELTLKEHLELTGMAYGISEEELHARMTPLLKEFRLEKKLNWFPAHFSKGMKQKVMIMSAFLIEPKLYIIDEPFVGLDPLGIQSLLNWMDEMRSKGASILMSTHILATAEKYCDTFIIIHQGEIRAEGTLKDLQTNFEMPGASLDEIYIQLTKEEEADEDDI

SEQ ID NO: 1976 - protein, 407 aa, Listeria monocytogenes
MKMIFDSKALWKERFSAYTTEVMRYLRYMFNDHLLFVLVIGLGAGIFYYAGWVKTLEPTFPVIPLMVILLTASIAVSPVATLLKKPDIVYLIVQEKAMDTYFSQAKIASFFMQLYVFVIVLGVCMPMYVEVTKVPYSQFFTLFIVLSMLKAWNIYFGWESMKFEEADTTWMFIRVILNAILIYIALIAAPYISIPLVLVVLAASYYWLRTKTAKVTLRWEYLVDKEEARMNRFYRLVNLFTDVPHLRGTVRRRSYLDFLYQPIPYAKRKTFAYLFSRTFIRTNEYAGLYIRLTVIAVILLVFVQGFYLSIIFSLLFLYLTGFQFIPMLKHYDAQIMLRLYPINDRYRHRSFIHFLRILLLAQALLFSVIGIAQNGTIGGMIILGINLAFVVIFTFLYAPVRMKKMYE

SEQ ID NO: 1977 - protein, 167 aa, Listeria monocytogenes
MKKVFITTGTEHYLRQLMANYTGGNVTLLQNFSQSLLYQESTGEKLFQEGAEYRVLQSSGSIKGFGVVVFEYIHLRDEEIPIFLQMYQRASLHFSETPGLQSTKLTKAMNMNKFLIISFWDSEVFFHDWKKSPLSKEITNIMRKNNTQSGFSHEDIYHYPEFSHDAK

SEQ ID NO: 1978 - protein, 129 aa, Listeria monocytogenes
LVQSINTKVDLTIDATAYTGLTDYGKIMIGDKGFEFFNSRDVRKFVQIPWEEVDQVIVSVMLKGKWIPRYAIKTKRNGTYTFASKRPKEVLRKIRVYVDPANMVSSLSFFDVMKRSFRSIFSKKKNKNK

SEQ ID NO: 1979 - protein, 353 aa, Listeria monocytogenes
MTKITNDLFLKAARKEQVDRIPVWYMRQAGRSQPEYRKLKEKYSLFEITHQPEICAYVTKLPVDQYGVDAAILYKDIMTPLPGMGVDVEIKSGIGPVIHNPIRSFQDVEKLTIFKPEIEVPYVLDTIKLLADDMLDVPLIGFAGAPFTLASYMIEGGPSKNYHQTKSFMYREPEVWAILMEKLGRMTANYLIAQINAGASAVQLFDSWVGALSRADYAEYIRPVIEMIVREVKAVHPTTPIIMQAVGASHLLEEWETMPLDVVGVDWRETITSARKKVPTKAIQGNLDPSTLLAPEKCLKEANRILQEGVLEPGYIFNLGHGVFPEVPPEMLKQLTNYIHERSEILLKKDDIK

SEQ ID NO: 1980 - protein, 309 aa, Listeria monocytogenes
MTKKVGLLVMAYGTPYKDEDIERYYTDIRHGHKPSEEMIADLRGRYHAIGGLSPLAKITEAQAYGLEKALNDSQDEVEFKAYIGLKHIEPFIEDAVEAMHKDGIEEAISIVLAPHYSSFSVEAYNKRAKEAADKLGGPRINAINDWYKQPKFIQMWADRINETAKQIPADELLDTVLIVSAHSLPEKIKQHNDPYPNQLQETADFIFEKVVVPHYALGWQSEGKTGEPWLGPDVQDLTRELYGREKYKHFIYTPVGFVAEHLEVLYDNDYECKVVTDEVGAAYHRPPMPNSDPEFLEVLRTVVWEKYSN

SEQ ID NO: 1981 - protein, 114 aa, Listeria monocytogenes
MKNKAEKQRIATNLSLYMKINGYTHRTFALAVGISQNTLKALMIGKMRNENKFQKYISQITESLALEEKFFEQPKEAITAAPITFQDTNKMHLGDEKFNAISLMLKIGEIHYES

SEQ ID NO: 1982 - protein, 140 aa, Listeria monocytogenes
MKITTKGRYGLTITLELAKRIGDGPISLRSIAQDKNLSEHYLEQLIGPLRNAGIVKSIRGAHGGYVLNGDPEKITAGDIIRTLEGPIVLVESMEDEEAAQRELWTRMRNAVRDVLDQTTLADLLKHSTDSELTDGYMFYI

SEQ ID NO: 1983 - protein, 401 aa, Listeria monocytogenes
MESVFMFFCTLLVWLMTPGIALFYGGMVRRKNVLSTAMYSFSSMAIISILWVIVGYSLAFAPGNGFIGSFDWTFLHNVGFAANATYSDAIPHVLFMMFQMTFAILTVAIISGAFAERMNFSAYLIFIILWSLLVYSPVAHWVWGDGGWLRNLGALDFAGGNVVHISSGVTGLVLAIMIGRRKEADSASPHNLPLALIGGILVWFGWYGFNVGSALTIDNVAMTAFVNTNTAAAAGIIGWGLVEWLTNKKPTMLGTISGAIAGLVSITPAAGFVTVPSSLIIGFFGGALCFWAVFWLKGKVKYDDALDAFGLHGIGGIWGGIATGLFATTKVNEAGADGLFYGNASLVVKQLIAIGSTVAYVAVVTALIVVIIKLFLPIRVNEEQEYKGLDLTLHGEKAYQE

SEQ ID NO: 1984 - protein, 121 aa, Listeria monocytogenes
MSGLTKIEIITRPNRFHLFQKELAKIGVSGLTVTKALGTGLEKGFIELYRGTKKESNIHERMKIEIVVSTVPVEDVLRVVKETLRTGEPGDGKVFIYPLAEVVKISTGETGIDALQDKPSK

SEQ ID NO: 1985 - protein, 126 aa, Listeria monocytogenes
MRKIPIFTVLVAILLFGGYYLYQHASSKVDVTFNFVVDQKSKNNTITGKIDGAGNKSITLPLSEESWDAVKKGNRYNVEATFYNKNKISSSEAKELDGPFWSNDSNRGLLVNKVHVENIQELSDDF

SEQ ID NO: 1986 - protein, 591 aa, Listeria monocytogenes
MEKRTSYCGELNEAHIGQSVVLHGWVQKRRDLGGLIFIDLRDREGIVQVVFNPEFSKEALEIADSVRNEFVVTIKGTVHARGEKAINEKLATGKVEVLAEEITILNTSKTPPFYIEDGVNVSDELRLKYRYLDLRRPEMNNIFKMRHTVTRTFRNKLDALGFFDIETPYLTKSTPEGARDYLVPSRVYPGNFYALPQSPQILKQLLMTAGFDKYYQIVRCFRDEDLRGDRQPEFTQIDLETSFLTKEEIQAITEDMLVDVVKEAKNITIEKPFPRMTYKEAMDRFGSDKPDIRFGLELQNVSDVVKDVDFKVFQSAIENGGEVKAINAKAAAANFSRKDLDALGVFVANYGAKGLAWLKVEAGELKGPIAKFFPEDKAAELKVALQAEDGDLLLFAADKADIVAASLGALRNKLGKDLNLINEEELAFLWVTDWPLFEYDEEAERYVSAHHPFTLPKEEDIPLLETDSSKVMAEAYDIVLNGYEIGGGSLRIYKKEVQESMFRALGFTDESAKEQFGFLMDALEYGTPPHGGIALGLDRIVMILAGRNNLRDTIAFPKTGSAVDPLTNAPGEVSEAQLAELKLETVKKETN

SEQ ID NO: 1987 - protein, 303 aa, Listeria monocytogenes
MAEKIELSKRDRLRVAWRSTFIQGSWNYERMQNGGWAFSMIPAIKKLYKTKEDRSQALKRHLEFFNTHPYIASPILGVTLALEEERANGAEVDDVAIQGVKVGMMGPLAGVGDPVFWFTIRPMLGALGASLALSGNILGPILFFVAWNVIRWGFMWYTQEFGYKAGSKITDDLSGGLLQDITKGASILGMFVLAALVQRWVNIQFAPIISKVKLDEGAYIDWSHLPQGAQGIKTALEQQQAGLALSEIKVTTLQNNLDNLIPGLAAVALTFLCMWLLKKKISPIIIILGLFVVGIVGHLIGLL

SEQ ID NO: 1988 - protein, 425 aa, Listeria monocytogenes
MDLQLPRGTRDILPEEVSKWHFLETEFKNVCENYQYEEIRTPVFEHTELFERGVGDSTDIVSKEMYTFQDKGGRSLTLRPEGTASVVRAFVEHKLYGEVSQPIKMYYNEPMFRYERPQGGRQRQFTQMGIEALGSDDPSIDVEVISLAMEFFRKIGLTNIKLVINSLGDKESRLKHREALVAHFEPHIDEFCAECQVRLHKNPLRILDCKKDHDNPLIQSAPSILDFLNEESVAYFENVKNYLNALEIPFEIDPTMVRGLDYYNHTTFEIMSVEEGFGAKTTLCGGGRYHGLVREFGGPDTPGMGFGIGVERILLALEKADIEIPAKKPLEVYVITAQPEAELKGVTLVNKLRQNGISAEKDYLKRKFKAQLKDANRKNAVYTIILGEEELQTGNYQLKNMETGEQEAVSETTILEKLSNTKGEK

SEQ ID NO: 1989 - protein, 621 aa, Listeria monocytogenes
MCGFVGCVHDRITEITGADKETFRQMNSMITHRGPDDEGYFTDDHVQFGFRRLSIIDVENGHQPLTYENERYWIIFNGEVYNYVELREQLVAEGMTFETESDTEVIIATYAKYKEKTAERLRGMFGFVIWDKQEELVYGARDPFGIKPFFYAEEDDKLFMGSEKKSILHALKEKELDEVSLQNYMTYQFVPEPDSLTKNVKRLEPGHQFTKKIGQPMEITTYWKASFAPVTKSEDAWIKEVRDVMYDSVKMHMRSDVPVGSFLSGGIDSSIIAAIAKEYHPAIKTFSVGFERDGFSEIDVAKETADKLGVENISYVISPEEYMKELPKIVWHMDDPLADPAAIPLYFLSREARKQVTVALSGEGADELFGGYNIYNEPNSLAMFNKMPGVFKSMLNNLARIMPEGMRGKSFLERGTTPMEERYIGNAKMFTEKEKQILLPKYQAGHDYTNITDPFYAETTNYHPVERMQYIDIHTWLRGDILLKADRMTMANSLEVRVPFLDKEVYNVARNIPDTMKTTNGTTKYILRKAAATFVPEHVLNRRKLGFPVPIRHWLKDEMNAWVKNIIKESPTDHLINKQYVLDLLDDHCAGKFDYSRKIWTVVIFMIWYDVYVADKYDFGK

SEQ ID NO: 1990 - protein, 191 aa, Listeria monocytogenes
MNLRGILPFAHDTLRKVVRSGDYVVDATCGNGHDTLLLAELVGINGHVLGFDIQQLAIDATNTRLENAGVSSQVELVCASHARIPEYTSKPVRAAIFNLGYLPGGDKEITTTADSTLESIGHLMELLEVGGVIILVIYHGHPAGKQEKDAVMTFCEAIPQQDFHVLSYNFINQKNDAPFVIIIEKRKPRQS

SEQ ID NO: 1991 - protein, 321 aa, Listeria monocytogenes
VKQTNPFVYSNDNKRYHTWNYCLREEFGQKTYKVALDGGFDCPNRDGTVAHGGCTFCSAAGSGDFAGNRALDLKIQFQQVRDKMQTKWKDGKCIAYFQAFTNTHAPVAELREKFETVLNEPGVVGLSIATRPDCLPDDVVEYLAELNERTYLWLELGLQSAHDETGRLINRAHDYDCYVEGVRKLQKHNIRICTHIINGLPKETPEMMMETTRKVVESGVDGIKIHLLHLLKGTPMVEDYKKGDLEFLTRDGYVNLVADQLEILPPEMVIHRITGDGGVDDLIGPVWSLNKFEVLNAIDAELVRRDSWQGKLYQPVEVNAK

SEQ ID NO: 1992 - protein, 341 aa, Listeria monocytogenes
MKKVTMQDIADRLNITKNSVSQALGNKNGVSEQTKLAVFKMADELGYKYKREIAREVVKEKFALLATSFALSQRSFFGEIIDNMKQSIIAHQAELIIFPVTDEEAATNQLPEQLTSENWTGIFLLSHINTDYSKKVIDLGMPVVLIDHHDPHLKADAVISQNKDGAFMAVEFLIQNKHQKIGFLGDVTFSPSYEERLEGYKKALQYYHIPFNKKYAITRIKEEQTTLYRTLDELDELPTAWFCVNSGLGFILNTYLQSKGYNIPKDLSIICFDNTEFTVLSNPQLTTMCTNLSFMGEKAVELMYNRIRKPDEGFVHLALATNLIARDSVGENKKTDSASES

SEQ ID NO: 1993 - protein, 237 aa, Listeria monocytogenes
MVACLCIHGFTGSPSEVKPLADYLREHTDWDVLAPTLPGHDHLRHLKNVTYKDWIVFVDSILSQMLKEDDEVYIIGFSMGGLLAGWLARHYPEVKKLVLLSTAVNAMEWPQLVENSKQVLTEAKEVTLKNSPMFKRYQKKVTETPWTSTLQFKKMVALAKPVFEHIEIPTFIAQGSADQVVPAEKSVNFLMESIPGPKELFILEGSKHVICQDEQADKLFAAVLTFLQKDVAVLNTK

SEQ ID NO: 1994 - protein, 457 aa, Listeria monocytogenes
LKKTVGEVVAMLDSSIHVDAFRDVVITGVCFDTRQIKSGDLFVPFVGNVRDGHEFVGQAREMGAVATFWQKNVPNPPTDFPVILVEDTLLALQELAAKYIQQVKPKVIAITGSNGKTTTKDIMAAIVETTYKVHYTGGNFNNHIGLPYTILTMPEDTEVAVLEMGMNHRHEIEVLSKIAKPDIAIITNIGEAHIEYLGSREEIAKAKLEITAGLNPSGILIYPHEETLLLGNINGDFRQLTFGKSEAAEIYPLEIRAEAEGTSFITNWEPELEIFVPIIGEHNVFNTMAAMLAAREIGIEGEKIQSALKNMERSKSRLEWITTKSGARILNDAYNSSPTALKTVLKTFMHMDSSGKPKYLVLADMLELGDLSTKLHQESAEVLENDTIQKVFLYGDAMKAFGEVAESKIGQGKVHHFDTKESLETALLSEIKGNEWILVKGSYGMGLKDVVENLIIK

SEQ ID NO: 1995 - protein, 370 aa, Listeria monocytogenes
MKTKLILLYGGKSAEHEVSLQTAFSVINALDLEKFEAAPIYITNEGEWIQGPLLSGKLDFVEQLRFSATDTIKLATTESEKSEGEAISPAVLEADGQETVVFPLLHGPNGEDGTVQGLFEVLNIPYVGNGVLASSAAMDKIVMKKIFADAGIPQVPAVAVRLIDWKNYQEEMVAEMEEVLTYPVFVKPANLGSSVGISKATNKKELVDAMTEAFLYDRRVVVEQGVVAREIEMGVLGNDTPVCSVPGEILPEGAVATFYDYKAKYQDNNTALIIPTEVDPEILEQMKEYAIQAFLGLDASGLVRADFFLTEDNQLFLNEVNTMPGFTPYSMYPLLWQETGLPYGALIERLVDLAKERHAAKNALKYKLED

SEQ ID NO: 1996 - protein, 106 aa, Listeria monocytogenes
MDWIFLLVAGLCEMVFVVMLKLSDGFKKVGYAILTIIFMSASFFLLSLALKTIPIGTGYAIWTGIGAVGSVTLGMIVFKERKSVGKLLFITMIIAGVVGLKLTSGV

SEQ ID NO: 1997 - protein, 268 aa, Listeria monocytogenes
MSVISIILVVLIAFLAGIEGILDEFQFHQPLIACTLIGLVTGNLTACIILGGTLQMIALGWANIGAAVAPDAALASVASAIILVLGGQGVAGIPSAIAIAIPLAVAGLFLTMIVRTLAVPIVHLMDRAAEKGNIRSVEWLHISAICMQGVRIAIPAAALLFIPADSVQSFLEAMPAWLTDGMAIGGGMVVAVGYALVINMMATKEVWPFFVIGFVVAAISQLTLIAIGALGVALALIYLNLSKMGGGNSNGGGGGNSRDPLGDILNDY

SEQ ID NO: 1998 - protein, 113 aa, Listeria monocytogenes
LAWFYLIMAGLSEIVWAFGLKESHGFTMLGWSLLTIAFLIVSFGLFSISMKSIPIGTAYAVFTGIGAAGTAIIGMIFLSEGVSFWKIVSLIVLLTGIIGLKLVDGNESEKEAK

SEQ ID NO: 1999 - protein, 184 aa, Listeria monocytogenes
MTKKLIKEVALTLFAEKGYDGTALSEIAKAVGIKTPSLYAHFASKEALFLEVYQDSIQMELTELGRVAEREDLVGEEKLQSIFFVATDFSSNPDEKKFFQRAVFYPPKSLFQELKEETKTYEQLTNRILRETLEKIVSEEALVRWMHVFYALLDGLSVEHGIYDETEFELRRKSAWAVLASLLK

SEQ ID NO: 2000 - protein, 252 aa, Listeria monocytogenes
MKKEAVNQQSIYVHIDHVINNVATSGISFCDFLNGVGQPPENILLIKHNIEDASYNAHTAFHYLEPGDLANISKENFNPLCWIDFEDVELLNQLTPQEVAEMLYLAHTGRHLRSPFYYKLQNNFVYLTREDGRYNKVYYRNLNHFYMLLSYVIARKTAELVNEKGIFSFGKKKYVAEPPVELLKKMADHFKDGACIALDDVVRTRTQIEVPIGHGLTEEMTELEISSKIYYEEEVAKLVYDLKQNEWKYIEK

SEQ ID NO: 2001 - protein, 496 aa, Listeria monocytogenes
MEESPQNEPNKVEKDEEQKSKPGNGYIKMKLFPFIMLLFAFVFVTALVTTIVMSLGDDKQVKVSIPERKEFTKLYDVYDEITSKYYKDTNSTTMIDGAISGMVNSLDDPYSTFMSKKESSEFNDTISASFEGIGAEIQEKDGAIVIVSPIKNSPAEKAGLRPQDIITQVDGKSVKGDTATEATQKIRGEKGTKVTLTIQRSNEDKPFDVTITRDEIPIETVYKEMGSDKIAHVTISTFSETTYDELEKALKSLEKDGMKGLVLDLRGNPGGLLDQAVSISSLFVPDGKIVVQEQDKDGDKSAIKADSSSHGDYKVKVPTTMLIDGGSASASEILAAAAKESGGIKLVGTKSFGKGTVQTATTLSDDSTLKLTVAKWLTPNSEWIHEKGITPDVVVNMPDYATMTIPSSTKVYKNGDFGDDVKTIETLLKALDYNVGKVDGLYDTDTEYAVQRFQTANKLDVTGIMTGVTTDKLVELTQKHLKETDPQLQKAKALVK

SEQ ID NO: 2002 - protein, 737 aa, Listeria monocytogenes
MSDKYVRQDLNVFGMTCAACSTRIEKSLNKADGVEKANVNLVTENAAVYYDPEVTSTEDLIKVVKHAGYDAAEKMSKEEKDAVLEKNFKKEVRRFILSALLSLPLLLTMVTHIPYIHEMAFAETIGNWINPTIQLVLATIVQFYIGWRFYDGAYKALRGKSANMDVLVALGTSAAYFYSVVEYVRHIIDPSVMPHYYFETSAVLITLILLGKLLESYATSRTTESIAGLLELQAKEATVIREGKEWLVPVDSLKIGDVILVRPGEKVPMDAEIISGETSIDEAMITGEPVPVEKKPGDSVIGATINFDGAFQAKITKRMEETVLESIIRLVEEAQGIKAPIQRLADRISGIFVPIVLGIAAVTFIIWYLVTGTVDGSLEAAIAVLVIACPCALGLATPTAIMAGTGKGAESGILFKGGEHLERTSKVDTIVFDKTGTLTEGKLEVSDKKAANDQFFPYLFLMEQQSEHPIAKAIIKMLEPENMDVSAIKQGKIRAKAGHGMTGNLDDSKVELGAYRYVSSLTTIPKEDDELIESWMHAGKTVVAMAIDGVYAGALALSDTPRPEAKEAIQKLKAQGIKTAICSGDQSVVVENMAKDLGIDMFFAEQLPNDKSALVEKLQQDGHIVAFVGDGINDAPALAASDIGISIGTGTDIAIETGDVTLVSHRLTLIPETIELSKATMRNIRQNFFWALAYNCAGIPIAALGLLAPWVAGLAMAFSSVSVVTNALRLKRYKFKS

SEQ ID NO: 2003 - protein, 97 aa, Listeria monocytogenes
MKHDQPIVPRKEDETKLLQNRLRRIEGQIRGIAQMVEDDRYCTDILVQISAANKALKNVGLQVLEHHTAHCVVDAAKNGEDDVMEDLLKAIRQFSKT

SEQ ID NO: 2004 - protein, 321 aa, Listeria monocytogenes
MVGIILATHGEFAEGILQSGTMIFGEQENVKAITLMPSEGPEDIKAKMEAAIASFDSQDEVLFLVDLWGGTPFNQANGLYELHKDKWAIVAGLNLPMLIEAFSSRFTMESAHEIAANILAPAQEGVRVKPEELQPQVTATEQPQAEIAAVGDGKIEFVLTRVDSRLLHGQVATAWTKATHPTRIIVVSDAVAKDDLRKKLIEQAAPPGVKANVIPVQKMIEISKDPRFGNTKALLLFENPQDVLRAIEGGVEIEQVNVGSMAHSVGKVVVSKVLSMGKDDVETFEKLKEKGVKFDVRKVPNDSSANMEDIIKKAKHELKTQ

SEQ ID NO: 2005 - protein, 274 aa, Listeria monocytogenes
MSSLLTIALAVSISCVHTVEDQYFGGTNADSIAKVEQKSSGNQTLAELEKDPLYPYIDKQNKLTEKNGIKYIENEENMLVLANKDYSLQPTYTPPDLVRPNVTFSFGSQQVEKAQLRKEAATALEEMFVAANKDGKKLFAVSGYRSYKRQQEVFQAEVNAKGDQKAREAVAYPGTSEHQTGLAMDISSENQSYELTEAFGTTPEGKWLQENAHNYGFILRYMKGREAITKYQYESWHYRYVGKDAATIIYENNWTLEEFFEHVKALQKKVDAAK

SEQ ID NO: 2006 - protein, 233 aa, Listeria monocytogenes
MSVHIEAKQGEIAETILLPGDPLRAKYIAETFLEDVVLFNQVRGMLGFTGTYKGEKVSVMGTGMGIPSISIYVNELIQSYDVKNLIRVGTMGGIQADVKVRDVVIAQAASTDSQINRNTFAGVDFAPVADFSLLKKAYDAGIEKGLSLKVGNVFSADRFYNDQLDKQQLADYGVLGIEMEAAALYTLAQKYGRRALAILTVSDHIFTGEETSAEERQTTFNDMIVVALEAAIK

SEQ ID NO: 2007 - protein, 358 aa, Listeria monocytogenes
MKKAIMAATIFVLLLATLSGCSSPKSDFTAALQKTAENRQYTTNVTFQVNNLSDSYIKKLGPEIDLNQLKKSNIQYKISVDSDSSSSYSASSIHWKGKKPLDLTIHALQNSDDGKAYIPVSDFYDASDSISSLLPDSAARIFNQVLDQNKDLESKYLNLFETIQNFSNQTIDTETVDRQAKVLKKIEETAGIAIYSYLNDLDDQHFTSKDNGDIILKLSKNEISDLVNAVLTKLDDNGSVVALIGEIDGSTQKAAKKKWNNAQKSIQSSLKALTKNKAQTLDFKLILTPDSKKGFSKAIITTNFEDTKTKDLMDFTTTIDMLNYEKVPPMPEGKEIVSKKELDKAISDGLKLYLSSAQ

SEQ ID NO: 2008 - protein, 276 aa, Listeria monocytogenes
MKKVLGLIFTLSLVLVLTACGGSSDKASSSKDDKQLVVGASNTPHAQILEQAKPILKDKGIDLKIVKYTDYVMPNKALEEGDLDANYFQHKPYLELEEKEKGYKFADVGAIHIEPMGIYSKKVKDIKDLKDGAQVLLSNSKSDWPRVIGIFVDNGLLTLKDGVKPQDATFDDIKDNPKNLKFKYDFDPAYLMTAYNNEEGDVVAINSNFVVDQGLNPSKDAIAIESKDSPYANIVVTTEKKKDDKNITELVKVLHSKEIQDYITKEWDGAVVPVDK

SEQ ID NO: 2009 - protein, 224 aa, Listeria monocytogenes
MSKLQELFPNVDFQMMWVATQETLYMTLVSLFAVFLLGIVLGLLLFLTNNKKHAGARILYWVTAILVNVFRSIPFIILIVLLLPMTKSLVGTVIGPKAALPALIISAAPFYGRMVEIAFREVDKGVIEAAKSMGANMFTIIGKVLIPEALPAIISGITVTAISLVGFTAMAGVIGAGGLGNTAYLEGFQRGQPDVTVLATIIILIIVFIFQFIGDFLTKRTDKR

SEQ ID NO: 2010 - protein, 340 aa, Listeria monocytogenes
MITLQNVVKEYTSRNNKVLAVDHVDLEIEQGEIFGVVGYSGAGKSTLIRMFNGLELPSAGTVEVDNLLISQIRGSKLRKARQQIGMIFQHFNLLWSRTVAENIAFPLEIAGVRGEKRRFRVNELIRLVGLEGKENAYPAELSGGQKQRVGIARALANNPKVLLCDEATSALDPQTTDEVLELLLDINKRLNLTIIVITHEMHVIRKICNRVAVMENGKVVELGDVLDVFRHPQEKVTQRFVRQVTDSDETEELIHLLLDNYAEGKIVKLLFMSENATQPVISQVAKENDVMLNVLHGNLTQTQNGAYGTLYVQVLGTEDAINASLTQLRQLKVETEVLER

SEQ ID NO: 2011 - protein, 380 aa, Listeria monocytogenes
LKSKLELLFTKISHVMNVWQATFFAAVSWVLALITIQTIYLWSISIRDDSLFLREVSQAIVQLFGTNKYTRIMQSFWMMSLKFLIIFLIACLFFAFFYRLMRQRILKKQLRTINFALNDGKPVDTESFVPEIQELERNIENMRERQKKLMQQEEQAQQARNDLITNVSHDLRTPLTSILGYLSYIHEDRYRDEIELRYYTELVYGKARHLHKLIDDLFSYTRLDSVDYQLKKDELDIVELLRQLVAEYDGRAAERNMQIVEHFDANKLIIGGDGNQIMRLFENLFSNALRYGEGNKQIDVSAKKEDNMAVVRVTNYGEEIPNVDLPYLFERFYKVDKNRTTTGTGLGLAIAKSIVEKHGGIVTAESKKRQTSFIVKLPLI

SEQ ID NO: 2012 - protein, 146 aa, Listeria monocytogenes
MKLTIGCDHGGRRLKDAIVKHLREKDIEVVDIGTYTDESVDFPSYAEEVANQVVSGQSELGILCCGTGIGMSIAANKVDGIRAAVVSDTFSARATREHNNSNILCLGERVIGEGLALLLVDTWLEASFAGDRHKRRLDKITELERK

SEQ ID NO: 2013 - protein, 210 aa, Listeria monocytogenes
MTFLEFHQLVKEDLLIYSWIIKNFHLTRQKLMAGGEITMNREQVIVMEKGLLVQVNEEGKNDLYRVFIDQRIIFTTKGDITLTALEDTSYSIIRTDELIGKLEDQHLLPTFFLQIAEDFEKGLDWQRTLISVDPAERAEMILVKIIERYEINSENKPEFPRWLRINVLARFAKCSVSTMSSVVNELVNEGDLNIKGTPWLLTRPYQASCA

SEQ ID NO: 2014 - protein, 231 aa, Listeria monocytogenes
MTTSILIADDDKEIVDLVKLYLQNEGYTIYQAYDGAEVWRLVQEKQPTLVILDIMMPEMNGLEVCRLMRDNGILTPILMLSAKAEDNDKIMGLLTGADDYMVKPFNPLELSVRVKAILRRMQQMSQAEPVSQDKVIIGPIVVDRGLHVVTVGGKELHLTTSEFDILFLLASEPGRVFSSEYIFEKIWQEKALGASKTVMVHISNLRDKLREAMGGENVIKTIWGVGYKIEI

SEQ ID NO: 2015 - protein, 291 aa, Listeria monocytogenes
MNHSNLTILSVCSNFVIVVLKLIVGFFTGSVAVISEGIHSSMDLFASIITFFSIRISNQPADEDHPYGHGKAENIAGTIETLLIFVAGIWIIVESVNKLVNPHEIRFPALGIMVMLFGAIVNIIVSRIIKKAADEANSVAMKSNALHLYTDVFTSLGIALSLFLVYITGWLWLDPVIAILTAFYIMYEAYKLLKESFPPLMDKRLSADEEEAIKQIILAHKTRFIEFHDFRSRRAGAEEYIDFHLVVSSSMTIESAHSLCDEIEAEIMNFYAKAEVLIHLEPEEERVLTRI

SEQ ID NO: 2016 - protein, 743 aa, Listeria monocytogenes
MTEQWYEFAGGNWQQEVDVRDFILKNYRLYDGDDTFLVGPTEATTKLWDQVMDLTKKERENGGVLDMDTKIVSTITSHDPGYLNKDLEKVVGVQTDVPFKRALQPFGGIRMAEVAAESYGFKVDEEISHIFSEYRKTHNQGVFDAYTAEMRAARKSGVITGLPDAYGRGRIIGDYRRVALYGVDFLIKQKKQDLNNTGLRTMSDDVIRQREELNEQIRALGELKVLGEKHGFDLGRPAKTAQEAFQWLYLGYLAAIKEQNGAAMSLGRTSTFLDIYVERDLRNGLITEEEAQEIVDHFIMKLRLVKFARTPDYNELFSGDPTWVTESIGGITEEGVPLVTKNSFRFLHTLDNLGPAPEPNLTVLWSTHLPSGFKKFCAKMSIKTSAIQYENDDVMRPKWGDDYAIACCVSAMRVGKQMQFFGARANLAKTLLYAINGGIDEKSKAQVGPAYRPIEGDVLDYKEVMEKYDAMMEWIAELYLNTLNVIHYMHDKYAYERIEMALHDTEVLRTMATGIAGLSVAADSLSAIKYATVRPIRDEDGIVVDYEIEGDYPKYGNNDDRVDEIAVELLKTFMTKVRKHKTYRDAVHTTSVLTITSNVVYGKKTGNTPDGRRAGEPFAPGANPMHGRDTKGALASLSSVAKLPYEYGQDGISNTFSIVPKALGREDESQINNLVAMLDGYSTKMGHHLNINVFNRDTLLDAMDHPEEYPQLTIRVSGYAVNFIKLTREQQLDVIHRTMHESM

SEQ ID NO: 2017 - protein, 248 aa, Listeria monocytogenes
MTEVLGRVHSVETMGTVDGPGIRFIVFMQGCLLRCQFCHNPDTWKIGTGTERSAQDVFDEAIKYKEFWDASGGGVTVSGGEPLLQVDFLIEFFTLCKAAGVHTTIDSCGGCFTRDPEFIEKLDRLMEVTDLILLDIKQINPEKHLKLTTKSNAPIIDFAHYLRDKEQPIWIRHVLIPTKTDDPEDLTKLHEFIQTLPNVKQVDVLPYHTMGVYKWKEMGIRYPLEGIEAPEEEVVALANKILETSSYK

SEQ ID NO: 2018 - protein, 176 aa, Listeria monocytogenes
MIPNVLEYTLLQMIAREASSGYELANRLRIMQNTHHSQIYPSLSKLEKAGFLVVHKHSQDKKPDKKVYTITQSGLDSLLEWSETPLKIPVTRDEFTTKVQLDWLNNARTKGLIQERESYLKEQLGLIEETLDHFVKLFDLKTKQDKLKNMSYQVYARRLDLIQTELKWCAEMYKIL

SEQ ID NO: 2019 - protein, 397 aa, Listeria monocytogenes
MMTDKEMNTGKWITAAASLLAFMGIGVVDPLLPSIAESIGASHSQVEMLFTAYIFTMAIMMIPIGIVAGKMGDKKLIVIGLFIVTIFALLCGLSDTIGALSIFRAGWGFGNSMFMATAMTMLIALSETPGHAIGIYEASMGLGMAFGPLLGGILGNISWRYPFFATACLIFIAFLLILFKVKEPKKVAPAPTEKNEVAIKQMLHLFKYRPFLQIAFSGMFYYYCFFTILAYSPLVLGLSAIQIGFVFFAWGLCLALGSAKVSHALEIRFNSKQILKGSLLACAVILALLGFIDNTAVDIGLIVISGLILGINNALFTTTVMEHSPYARSVTSGAYNFVRWLGAAFAPLCSGLLSEALGMKMPFIVASIICLAGMGLLFIKLKPAHFTLQQSTSIKSE

SEQ ID NO: 2020 - protein, 333 aa, Listeria monocytogenes
MDKNIKVSFKHVSKEYDLYQNKSDKIKGLFLPKSKRVQSFWALRNVCFDVYDGETVGLIGINGSGKSTISNIMSGVIPPTQGEVVINGETSLIAIAVGLKGPLSGLENIRLKLLMHGLKGSQIDSLLPSIIEFADIGDFINQPIKNYSSGMRSRLGFAISVHTDPDILVVDEALSVGDQTFYQKCVDKINEFKAQGKTIVFVSHSLGQVKSLCDKIIWMHHGEVREIGDAAEVAEKYDEFVKWFNKQPNDFKKKYQKEQKEKQKLPQEKIYPTPNANKYKMGLFDKCFLVVLLALLVLFGSLISTGKSFMGLFSATDNKVEQVTKVDKRTDWK

SEQ ID NO: 2021 - protein, 186 aa, Listeria monocytogenes
MTSEFFSTLLLIIGLLIGFFLAILLILAGIRRFFCSAEEPLKRIRRYQVWHNRYQFNEEVTSFFTVIGATLLVSLITVQITAIPFQYTVLIFWSSWLFHLLSFWKKIRVPKKMKNEMIQLAGFLLITALYFVGYFAMKSLHFSIIHVADFPGVIQFGIRTYLTICSLFVASGALIVWQRIYVKLLK

SEQ ID NO: 2022 - protein, 562 aa, Listeria monocytogenes
MSNSKFIITELYWERIQLHVKGKIENISLENYTFSFRTLTDEFHFSPTGIKLEGNTFDLRFNIAILNDGNYLPSGDYLLSLYNSETADEIVAQPAAELYKFPEDEDLLEELNEAKTENEKNNVLLAGLRKEFKRGGANLKYTYKVTPMISADVNEFVFSVSFTIPVPKPTKWQVFKNKIKEMYHTFSFNFRTGLFKSIFYTSQALVPKNGKRILFSSDSRAEIGGNFEFVLNKMKEMGIDKDYKIKMTFKPNIRLRRAFIEKFRFPFLLGSSDIIFIDDYHPMIYTIDFSEKTQVIQLWHACGAFKTVGFSRSGKQGGPFFDDRAHRNYTRAIVASDTDIPFYAEAFGIKESSILPTGVPRTDIFFDPEYKRNIVTTMEQLFPETQGKQVILFAPTFRGNGANQAHYPYFKINLAKFAEYCRKNNSVVIFKMHPFIKNEFIIPEQYADVFIDASSYREVNDILFITDILITDYSSVIFEFSTLQRKMLFYAFDLEDYVSTRDFYEEYEGFVPGKIVYDFEALIKALEMNDFEQEKVKPFLDKHFKYQDTNSAKRIVEEIFKK

SEQ ID NO: 2023 - protein, 290 aa, Listeria monocytogenes
MKVKKAVIPAAGLGTRFLPATKAMPKEILPIVDKPTIQFIVEEAVASGIEDILIVTGKGKRAIEDHFDSVPELENNLREKNKLDLLHLVEETTNINLHFIRQSKPKGLGDAILQAKGFIGNEPFVVMLGDDIVQSKTPCAKQLIDQYEKTHSSVIGVQNVPREETYRYGIIDPDKEVSDRLYNVTGFVEKPNVEDAPSNLAILGRYLLTPEIFKYLETQEAGSGGEIQLTDAINRLNEIQPVFAYDFEGERFDVGDKFGFIETTLKFALKHPEIKDDVRDLIIRLGDELK

SEQ ID NO: 2024 - protein, 952 aa, Listeria monocytogenes
MEDVRKKWKKVQWDNEITYKTFLTYSVLFVLVTISIYLLFWLRGYSFIWSHDGFNQHYPILKEFRNMLVDFLKHPTQVPELWSWQIGMGGDVVGSFGYYVLGDIFAYLVVLFPADQMELAYTTLILLRLFCVGIAFLALAKNFKINHIAAVTGSLVYVFSGYLFVSATRHPFFITPMILLPLLCLCVERVLQKKSPVPLILVICWTLVSNFYFAYMLAIMVCIYTVIRYFTHYKKQGIPLLSTIGKLAVYAITGFLMACILFLPNLIAFLGSSRANGEFANGLWFYDLSYYLSLGKMYITTESAGYWANLGFAAIAVFVLPFIWQYRKKYPVVFISLVLGLGMMLFPFFGALFNGLSSPSNRWMFAVALPVSIGVSFLLTDYKTLTKKDMRNFLITLIIFIVVSWWGPNFNIYQPILLVPLTLMLLTFFVFFLQFINLNYIKKKAYNGLFYFLIIMLVCVNLAYMGNYMFSKNGANKVQGQLNSGVVERKITELYGGADKKIDKSSFYRTSLSSGYNGFYDNSDANILLDVNTVNSFYSITNGAVADLASELNNSQFRMTLPLGQMDNRTIFTNILGTTYLFARDDQAGRIPYGFKKIDSAEIERVDKPGISHTDVYESENSVPLMYMNYHTEDRESYEKLSPLEKEEALSYNAIIDNKDTSKREYKSNIKELEFETSIPKVNGKAPAKLTKDKIEVSNAENSIQFKLKNPEETKNAELYFYIDGLDFTPYTFKQRKDIAFAKDEYKTKNMRYNYYRNNLTKRIKEDYTLTAKTSNRVVSASQVDKSELSGYFKRDNMLLNGGFSEKARKQVSINLSGLGTYDYDNIKIYAVPFDDSYTKRMQELKKQAATDLKFDTNKVSAKVSAKQDGVLVTTIPYTKGWKVKVDGKEVSTEKVNTGFIGFSLDKGLHTIEMNYETPMLKAGMVASGLGVILFAGIIVVYHLRKRKNKTQ

SEQ ID NO: 2025 - protein, 237 aa, Listeria monocytogenes
LNKKNKFFDIYLELEQDITSGVYPAGTLLPSENVLAKRFSVSRETIRKALVLLLENGCIQKLQGKGSIVIDRERYSFPVSGLTSFKELQKSEQMNATTEVIRNEETTLPDRIADFAGLPHGSNCLAILRVRYLEGEATILDYDYLLDKTEPIANEILEDSLYQYLENEKGYEISYAQKEITVEPLNAEDKKYLALHGDTHVVVVKSTVFLKDTTLFQYTESRHRLDKFRFIDFARRR

SEQ ID NO: 2026 - protein, 548 aa, Listeria monocytogenes
MTKFAQKTIYQVYPKSFYDTTGDGTGDIPGITAKLDYLQKLGIEMIWLNPFYPSPQNDNGYDIADYTAVDPLFGTMDDVTTLIKEAKKRNIGIMIDLVLNHTSTEHPWFKKALAGDPFYRDFYYFRPAKADGSPPTNWVSKFGGNAWEKLPDSSEYYLHLYDVTQADLDWANPNVREALFAVVNFWIDKGVEGFRLDVLNVIAKPKFLEDDFEGDGRRFYTDGPGIHAYLKELHERTFGDKPIITVGEMSSTDIDNCIRYSNPDEKELSMVFHFHHLKVDYPDGEKWRLADVNFENLKSIFHTWQVAMSDENGWDALFWNNHDQPRALGRFASDKPEHYYHSATLLGATIHFMRGTPFVYMGEEIGMMNPKFPTIDDYVDVETLNHFDILQKNGLSEQEVMEIIKERSRDNSRTPMQWDDSQNAGFTTGTPWLKVADNANEINVQTALSNKTSIFYFYQKLIALRKEHPVIQTGDYTPYLTEEDSIIAYKRSNETTSLLSIHHFGSEKKKIQLPTEFLNAEVLLSNYERQRISSELELAPYETLTLIQ

SEQ ID NO: 2027 - protein, 494 aa, Listeria monocytogenes
MVDYKKDASALLELIGGKENISSVTHCATRMRFVLQDPDNADVEAIEDIPAVKGTFTQAGQFQVIIGNDVAIFYNEFSKISGVEGVNKEDAKVDAKKNMSLLQRLLAGLAEIFTPLIPAIVVGGLILGFRNVIGDIKFLEDGTKTIVDVYPFWAGVYSFLWLIGEAVFHFLPVGITWSIAKKMGTTQILGIVLGLTLVSPQLLNAYSVVETKAGDIPVWDFGFAQVQMIGYQAQVIPAIMAGFLLAYLEIWLRKFIPNAISMIFVPFFALVPTVLAAHVILGPIGWKIGDAISNVVYAGLTGGLSWLFAALFGFLYAPLVVTGLHHMTNAIDLQLMSQFGGTNLWPMIALSNIAQGSAVLAIIFLHRGNEKEEQVSIPATISCYLGVTEPAMFGINLKYLYPFVAAMIGSAIAAVVSVSSGVMANSIGVGGLPGILSINPKYYAVFAVCMLITIVVPFILTVLFRKYNILNKVDTAPIRTFGKKEYRESAKTTN

SEQ ID NO: 2028 - protein, 182 aa, Listeria monocytogenes
LELPFSGQSIIPAAHNQKDMEKILELGLTYMVMLETHVAQLKSLVKYAQAGGKKVLLHADLVNGLKNDDYAIDFLCTEICPDGIISTRGNAIMKAKQHKMLAIQRLFMIDSSACNKGVALIQKVQPDCIELLPGIIPEQVQKMTQKLHIPVIAGGLIETSEQVNQVIASGAIAVTTSNKHLW

SEQ ID NO: 2029 - protein, 107 aa, Listeria monocytogenes
MKLKIVSPMGQFFEGEVEGFVINTKEGQQTVLEEHIDCLSFFDYSEISILDAVASDPIFVALGYLHLVQNEANIMAQFASADAEQAERIFERLNKRKQTESRRSNDK

SEQ ID NO: 2030 - protein, 601 aa, Listeria monocytogenes
MAKHIVELTDALSNKIAAGEVVERPASVVKELVENAIDAGSTVIDILVEEAGLNKITIIDNGSGIEEEDVATAFLRHATSKIKNEADLFRVHTLGFRGEALPSIASVSHLAMETSTGETKGTSISLEGGKIIEQKSGHARKGTQIEVSQLFFNTPARLKYLKSLPTELGNITDILNRLALAHPDISFRFSHNGKPLLQTNGNGDLRQVIAAIYGISIAKKSIPVKAESLDFKISGYAVLPEVNRSNRNYISTIINGRFIKNFALVKAIQEGYHTLLPIGRFPIIVLQIEMDPIIVDVNVHPAKLEVRLSKEKELGQLISQMIKEAFHKLQLIPEGEISKKQKEVQKSEQIQMSFEENKPAKEIPTLFSKPTIPEYVPSDEDAPREDDFILETMPPYEPQAEQEEHSKERIPKMYPIGQMHATYIFAQNENGLYIIDQHAAQERIKYEFYREKIGEVSRELQELLVPIVLEFPADEYVRLEEQKAKLEEVGVFLENFGQNSFIIRAHPTWFPKDQEEEMLREIIDEALSAPSISIHKLREDTAIMMSCKKSIKANHYLTTQDMEALLDTLREASDPFTCPHGRPVIIQYSTYELEKMFKRVM

SEQ ID NO: 2031 - protein, 860 aa, Listeria monocytogenes
MTEYTPMIKQYLEIKDKYQDAFLFFRLGDFYEMFFEDALNASQILEITLTGREGGTKEKIPMCGVPYHSASGYIDTLIEKGYKVAICEQVEDPKTTKGMVKREVVQLISPGTVMDERGLKAKENNYIASLYCYEGKEYGFAYSDLSTGELKSTVIEASEDRLINELTTLSTRELIVSSSEKEVLSDVMKEQLGLTFSVHEEDTIPAENEKLVTRHMSLSEKRAIGKLLHYLKETQKRDLGHLQQAVHYETSNYMKMDYYSKRNLELAESIRGKGRQGTLLWLLDNTQTAMGGRMLKQWIDRPLIDRKKIIERQNDVSELMAHFFERLELVENLKNVYDLERLAGRVAYGNVNARDLIQLRNSLYQIPRIRATLLSMSSESLTELAEQLDPCEELTEKLEEAIMDSAPISIREGGIIKDGYNSQLDTYRDASRNGKTWIAELERKERELTGIKTLKVGFNRVFGYYIEVTRANTHLLPEGRYERKQTLTNAERYITPELKEKEKLILDAEEKSMELEYQLFSEVREMVKDYIERLQKLAKSVSEIDCLQSFADISEKNHFIRPTLSEDGSLHVKQGRHPVVEKVMGAQSYVANDCDLDENREILLITGPNMSGKSTYMRQVALTAICAQVGCFVPAEEAILPIFDQIFTRIGAADDLIAGQSTFMVEMLEARNAIVHATKDSLILFDEIGRGTATYDGMALAQAIIEYIHENVHAKTLFSTHYHELTDLEKELRGLQNIHVSAVEENGKVVFLHKIKEGPADKSYGIHVAELAELPKSLIERASRILEQLENDDKKIIIASVKQPEEVHEEVQLSMFPLEPEKKASSKETKLLKEIASMNIMQMTPMDAMNKLYELQSKIH

SEQ ID NO: 2032 - protein, 120 aa, Listeria monocytogenes
LTVSKDEIMKKATELRDALQQTEEVSFYRLAEERINANSKVAAKVSKIKLLQKEAVNLEHYQKLEAMKQTENQIDNVRADIDSLPIVTEFRRAQEDANDLLQSITTEITTKVTTELEKEN

SEQ ID NO: 2033 - protein, 246 aa, Listeria monocytogenes
MEVSHVTLAPNKDSRAAVLTIGKFDGVHIGHQTILNTALSIKKENEILTAISFSPHPLWALKQIEIYREMLTPRMEKERWLAYYGVNHLIETEFTSRYAETTPEEFVTDHLTNLNLSHIVVGSEFNFGKGRDSDVDLLRDLCKPYDIGVTSVPVIETNQTKISSTNIRAFIRRGHFQEAEELLGHPWYITGIVENGEMTGLDDYVLPATGTYQTDSGIVNVTNNRTIEVGLSDGLQQLHMKNELSE

SEQ ID NO: 2034 - protein, 601 aa, Listeria monocytogenes
MCGIVGYIGTNNAKGILLEGLEKLEYRGYDSAGIALQNKELVTVVKEKGRIADLASLVPSDAFGTTGIGHTRWATHGKPNHENAHPHQSKSGRFTIVHNGVIENYTLLKEEYLKNHSFVSDTDTEVIVQLIELFAAELSTKEAFKKALSLLHGSYAICLIDQTNTETLYAAKNKSPLLIGKGENFNVIASDAMAVLKETDEFVEIMDKEIVIVTKDGFTLETLEGEEITRASYKAELDASDIEKGTYPHYMLKEIDEQPAVTRKIIQAYQDEAGEINVDKTIIDEILSSDRIHIVACGTSYHAGLVGKNLIEKMAKIPVEVHVSSEFAYNLPLMSKKPLFIFITQSGETADSRQCLVKVKELGYRTLTLTNVPGSTLDREADHSMYLYAGPEIAVASTKAYTAQISVLAVLAVSLGREIGDEEALNINLAAELGIVATAMEAMVSSKEVIEHIAGEYLATSRNAFFLGRNIDYFVAMEAALKLKEISYIQAEGFASGELKHGTIALIEDGTPVLALITQESINWNIRGNVNEVLARGAKTCIFAMENVAQPGDRFVIPQVHPLLTPLASVIPCQLLAYYAALHRDCDVDKPRNLAKSVTVE

SEQ ID NO: 2035 - protein, 301 aa, Listeria monocytogenes
MSIQTIFGNGQYNWINIDTDNTDKLADFYEEYHIDDEVIAYSIDRNERAHFEYDQKTNTFVIVFNVPDQRKIDNHYETIPMVFIIKDKQLITITNNDNQYITRKMKRYLKESDEVTIFQFLFSSLYFIMDAFFPYVEEMDTDRRTINDKLKIKTTKKNLLSLSDLETGIVYFVSASKQNAALLEQMKAHMIYRELNEVEKEQFEDALIEARQLVEMTGLSSQILQQLSGTYNNILNNNLNDTMKILTALSILLTVPTIITGFFGMNMPLPLEHNTFGWIVTIFISVILWFGLSFILRKLMR

SEQ ID NO: 2036 - protein, 458 aa, Listeria monocytogenes
MAQTSTIQNDTKAAEEYAARVFETIKQRNPGETEFHQAVEEFLNSVIPALAKEPKYEANGILEQLTEPERLISFRVPWVDDSGTVHVNRGYRVQFNSAIGPYKGGLRFHPSVTGSIVKFLGFEQIFKNSLTGLPIGGGKGGSDFDPKGKSDSEVMRFCQSFMTELQKHIGPDTDVPAGDIGVGGREIGYLFGQYKRLRGAYDAGTITGKGLSYGGSLARTEATGYGLVYFTVEMLEAAGETIRGKKIVVSGSGNVAIYAIEKAHELGAKVVACSDSAGFVYDKEGIKVETVKQLKEVERKRISEYTTIHPSAEYYAGGDVWSVPCDIALPCATQNEINADQARALVKNGVIAVAEGANMPSTLDAVDIYHENKVLFGPAKAANAGGVAVSALEMAQNSTRMSWTFQTVDEHLQNIMKDIYKNSSNAASEYGAPGNLVIGANIAGFLKVADTMISQGII

SEQ ID NO: 2037 - protein, 456 aa, Listeria monocytogenes
MKKHTGTIISISGFVLRIEFNESELPEIGFALEYHTHQGTYLAEVVQHTGINTVSAIAIGEVSGLARGTEVVNLGHPIEVPVGETVQGRMLNVYGKAIDGKPEPAAEVKWPIFRAQPLLRELDTNKEILYTGIKVIDLICPILKGGKTGLFGGAGVGKSVLMQELINNISMLGGNSVFTGVGERVREGIGLYKELEASGVLPQTTVVLGQMNESPGVRMRVALTGLTIAEYLRDEEKKDVLLFIDNVFRFIQAGSEVSSLQGKIPITGGYQSTLSKEVGDFQDRIASTKNGSITSIQCVFLPADDIDDPSAVATFSHLDSTIVLERSIAALGIFPAVNPLQSFSRALNPTFVGERHYQLAVQVKFILQRYMELQEIINVLGMAELSDEDRKLVHRARKIRNFLSQPFYVSEKFTGTEGTFVEIEDLLGSIERILNGDYDERSERDFLFIGSYKDLK

SEQ ID NO: 2038 - protein, 502 aa, Listeria monocytogenes
MAFYFEEPSRTFSEFLLVPGYSSAECVPTNVSLKTPIVKFKKGEESAITMNIPLVSAIMQAVSDDNMGIALATEGGVSFIFGSQSIESEAAMVSRVKNHKAGFVISDSNISPDKTLQDILDLKEKTGHSTVAVTEDGTAHGKLLGIVTSRDYRVTRMSPDEKVADFMTPFEKLVTANKSTTLKEANNIIWDNKLNALPLVDDNEHLVHMVFRKDYDSNKENKLELLDSSKRYVVGAGINTRDYEERVPALVEAGADILCIDSSEGYSEWQKRTLDYVRGKYGDTVKVGAGNVVDRDGFRYLAEAGADFVKVGVGGGSICITREQKGIGRGQATALIDVAKARDEYFEETGVYIPICSDGGIVYDYHMTLALAMGADFIMLGRYFSRFDESPTNKVNLNGTYMKEYWGEGANRARNWQRYDLGGDKKLSFEEGVDSYVPYAGSLKDNVAISLSKVRSTMCNCGALNIPELQQKAKITLVSSTSIVEGGAHDVVVKDASNNLIK

SEQ ID NO: 2039 - protein, 249 aa, Listeria monocytogenes
MDISSTEIWDAIRRNSYLLYYQPKVDAKTNKIIGFEGLVRLKTATTILAPIDFFDDIVLLNATREMQDFVAETAIKQINQLGGRFSISINIPAHYVASSTYMTFLHDYVKEHLKYPECLEIEIIERGEITELAIADKNLRKIKDLGVKVSMDDFGKGYSSLAYLRSLPIDIVKTDMSFIALLKTDRKQQIIIRAIVNLCHDLGGKVVTEGVEDMEQVEKLREMKVDYFQGYYFSRPLPMEEIKQKYSIV

SEQ ID NO: 2040 - protein, 375 aa, Listeria monocytogenes
LDRKCQLIMKKKFTQILLASVIVSSTLVPFVQAEAAGTNQTTVSQAGMTLSQQQFIQSIANDAQDLQKEEKILTSVTLAQAILESNWGKSGLSTSANNLFGIKGSYEGSSVSMGTQEFSSGKAYHTQADFRKYPDKKASLVDHAQLFVNGVSGNANLYSAVIGETNYKEAAYAIQDAGYATDPAYAEKLISTIENYNLDQYDQIYDTVTSTENQLAYAEIKNASNETIWTKPYNTEGAEKTGSVKDYKNKSLRISQKAVTEKGTWYQLQDQGKTIGWVNSNAVEVFYTPKNETNVKLDKYITDSDQKIYAYPVEDNSKVVTNLNDYLGKELDIDRRADVKNEYWYRIKSDDGKVIGWSKADGFAENNPNKALEVK

SEQ ID NO: 2041 - protein, 229 aa, Listeria monocytogenes
MKLVLIRHGQSEWNKLNLFTGWHDVDLSQEGVVEAMTAGKRIKEAGLEFDVAFTSVLTRAIKTLNYVLEESDQMWVPVHKSWRLNERHYGALQGLNKQETAEKYGADQVQKWRRSYDTLPPLLEENDERQAKNDRRYQLLDTHAIPSGENLKVTLERVIPYWMDTIAPEIKEGRRVVIAAHGNSLRALVKFLEGISDDEIMDLEIPTGVPLVYELNADLKPVNKYYLDK

SEQ ID NO: 2042 - protein, 866 aa, Listeria monocytogenes
MDLQKFTQQVQQTIADAQNLAIASEHQEIDVAHVFKVLLTESDFAKRVYDVAEVDTDALQKVIENTLEKIPVVSGSGVNYGQAMSQALFQLMRDAEKEQQQLEDDFVSTEHLILAVMDQKSNPITAELKNQHKAKKQIKEAILKIRGGKRVTSQNAEENYEALTKYGRDLVAEVRSGKLDPVIGRDAEIRNVIRILSRKTKNNPVLIGEPGVGKTAIVEGLAQRIVRKDVPEGLKDKTIISLDIGSLIAGAKYRGEFEERLKAVLQEVKQSDGQILLFIDEIHTIVGAGKTDGAMDAGNMLKPMLARGELHCIGATTLDEYRQYIEKDAALERRFQKVLVPEPTVEDTVSILRGLKERFEIHHGVNIHDNALVAAASLSNRYITDRFLPDKAIDLVDEACATIRVEIDSMPSELDEVTRKVMQLEIEEAALKEEKDPASERRLEILQRELADYKEEANQMKSKWESEKNEISKIREVREQIDHLRHELEEAENNYDLNKAAELRHGRIPAVEKELLELEAENREKTAQEDRILQEEVTENEIAEIVGRWTGIPVTKLVEGEREKLLKLADVLHQKVIGQDDAVQLVSDAVLRARAGIKDPKRPIGSFIFLGPTGVGKTELAKALAFNMFDSEDHMIRIDMSEYMEKHSVSRLVGAPPGYIGYEEGGQLTEAVRRNPYSIVLLDEIEKAHPDVFNILLQVLDDGRITDSQGRLIDFKNTVIIMTSNIGSNLLLERTEEGEISPELESDVMQILQSEFKPEFLNRVDDIILFKPLTLADIKGIVEKLVEELQIRLADQEITITISDDAKAFIAEEAYDPVYGARPLKRYIVRHVETPLAREIVSGKIMPHSSVEIDLADKEFTFKVTE

SEQ ID NO: 2043 - protein, 150 aa, Listeria monocytogenes
MKHIRVAAIIRHQNKILLHTTKNENYWTLPGGAVENELTKEGLQREMREELGEEVTIRELKIIAENRFVYRGEEMDSIEFYYIVELYPNSALLELSTFTKIEQFGQNGETDYELNFKWFEIDKVSEIEILPKFLQTELTQLSSDRIKHIQ

SEQ ID NO: 2044 - protein, 154 aa, Listeria monocytogenes
MDNCLAQLQMYDYLLKKYRNKEVFPDTRMIVEIDGKLWTGDFLQLDDCHIIEIDWEDTRFTRIERTKDAINDEFNEKVTNSNVNVSENRIDSKIGSLKNIEILYQEIGNFVRQVESSTTTLKPLLYNAYCLDTRVKLPFLDLSKKEITLVSLTN

SEQ ID NO: 2045 - protein, 306 aa, Listeria monocytogenes
MYKQMKLKATDGLDLHLHIWDEVENPVGVVQIVHGMAEHGARYGVFAERLNEAGYIVVADDHRGFGKSAIDESYLGHLDGETGFQDMIKDEVVVRTYLKETYPGLSYFIFAHSMGSFVIRTFMAQHQVDGVILSGSGLQPIPLLKMGQIITKQRIKKDEMKRSGFLNKLAFWGYNKPFNENHRFSWLSRDVAIYEAYEKDPFCGPVVGTSGFFHNLFEAVKISQQKETVESVPKDLPILLLSGSDDPVGHFGKDTPKIALALEAAGVEDVTYKIYEDARHELVNELCKETVFKDVIAWLNTKNKEA

SEQ ID NO: 2046 - protein, 415 aa, Listeria monocytogenes
MTELIKKGSAAKEAAQFLAQASTKQKNAALLNLSNDLLTHTASLLEENNKDIIRAREKGTPETMIDRLRLTEERIKEISEAVKQVVALKDPIGEVTNMWKNEAELTIGKTRVPLGVIGIIYESRPNVTVDASVLCFKTGNAVILRGGSDAIDSNKALMSVIQDSLEASGFPRSSVQLIEDTSRETARDMMRLNRFLDVLIPRGGAKLIQTVLENATVPVIETGTGNCHIYVDKAAEKQMAIDILVNAKCSRPSVCNAAETLLIHRDVADAFLPEIETALKEYNVELRADERAREILKDSKAATESDWEDEFLDFILAIKVVDSVDEAINHINKYGTKHSEAIISNDYATGQAFHQKVDAAAVYINASTRFTDGFAMGFGAEIGISTQKLHARGPMGLTELTSTKYIIFGDGQIRN

SEQ ID NO: 2047 - protein, 289 aa, Listeria monocytogenes
LSSIDQARKTIKALNSTYKIVHVTELATLGKLSALREKAEAAVSYYETILKSLRWVRKTMYTSNNQIKEEKNVTAIAITSERGLCGAYNSEVFAEIDQLIESLGDQVTINWVVVGEQGHRYLTKLGQNITSYLQFSLENIDLETTTAVTADFIDLIHSEQMDALYVIFTKYLNAVQSEAMCEKIYPEIPEDSDTELIEVDYVLDFETDDEQVEQLLLENYLCGLLYSMFRYSVASEYCMRRIAMKQAKDNIQKQLEEAIFDARKQALQQKTGELLDIISGAQTIRKDEE

SEQ ID NO: 2048 - protein, 276 aa, Listeria monocytogenes
MRESLKNSKRLVIKVGTSTLMYGNGHINLRTIEKLAMVLSDLRNEGKEVILVSSGAIGVGCHKLQLPVRPTSIPEQQAVASVGQSELMHIYSKFFGEYGQVVGQVLLTRDVTDFPISRENVMNTLESLLERGIIPIVNENDTVAVEELEHVTKYGDNDLLSAIVAKLVQADLLIMLSDIDGFYGSNPSTDPDAVMFSEINQITPEIEALAGGKGSKFGTGGMLTKLSAASYCMNANQKMILTNGKNPTIIFDIMQGEQIGTLFASKKEEFSHDGTH

SEQ ID NO: 2049 - protein, 379 aa, Listeria monocytogenes
LSEWYFKKNEQKVGPFTNVEMIALYRKKEINNLTLVQKSPHPEWVVFKQTELHQHALNHGNSELKIGNLFSAVFKKHSKEEGEKVFIAGTKYTTPATSDIPHTWPHPWVFSRVFLVLIITYFLLLACTYLFDNSNTIPGLMVIGSFAVPFSVLLFFFETNAPRNISVFDVVKMFFIGGVAALVATLVIYSIIPVGKLNYFNALLVGFIEETGKMIIVALFIRSLNSKYILNGLLIGAAVGAGFAAFESLGYAFNYSVDAAFLFKDIHIAGETMMNVIFSRGWQSIGGHVVWAAITGAALVIAKGDQKLGMHHIFTGTFWKWFIIPIALHFVWDCPFNPLPAIAFKQIVLIVIVWFVILRLISKGLKQVSVISAASKATK

SEQ ID NO: 2050 - protein, 131 aa, Listeria monocytogenes
MPNLSNRLTLLREKQGWSKAETARRLGLKAPSTYGNWEYGIREPDLEMVTQIATLYDVSVDYLLGQQSIPTYAPSELQNEKDIGKRITKISEDLKYEDDLNLDGQPLNESAAAFLADSINFLYEQAKKIND

SEQ ID NO: 2051 - protein, 459 aa, Listeria monocytogenes
MNQNPVEEGQKFPLTIRRMGINGEGIGYFKKAVVFVPGAITGEEVVVEAVKVRDRFTEAKLNKIRKKSPNRVTAPCPVYEACGGCQLQHVAYSAQLELKRDIVIQSIEKHTKIDPTKLKIRPTIGMEDPWRYRNKSQFQTRMVGSGQVETGLFGANSHQLVPIEDCIVQQPVTIKVTNFVRDLLEKYGVPIYDEKAGSGIVRTIVVRTGVKTGETQLVFITNSKKLPKKREMLAEIEAALPEVTSIMQNVNQAKSSLIFGDETFLLAGKESIEEKLMELEFDLSARAFFQLNPFQTERLYQEVEKALVLTGSETLVDAYCGVGTIGQAFAGKVKEVRGMDIIPESIEDAKRNAEKNGIENVYYEVGKAEDVLPKWVKEGFRPDAVIVDPPRSGCDQGLIKSLLDVEAKQLVYVSCNPSTLARDLALLAKKYRIRYMQPVDMFPQTAHVETVVLLQLKDK

SEQ ID NO: 2052 - protein, 133 aa, Listeria monocytogenes
MISGLSHITLIVKDLNKTTTFLREIFNAEEIYSSGDQTFSLSKEKFFLIAGLWICIMEGDSLQEQTYNHIAFRIQSEEVDEYIERIKSLGVEIKPERPRVEGEGRSIYFYDFDNHLFELHAGTLEERLKRYHE

SEQ ID NO: 2053 - protein, 117 aa, Listeria monocytogenes
MKKLFDETNEFEAKYYRTIWYGYIDNEFAPELSDEIKQLIQRDLAEKTANPIEATHWVFYNETQAGDAIGDKVRSSIMVRYREEKFVVHYNVSDFQFVTVFDVATAFKDQLEQALNA

SEQ ID NO: 2054 - protein, 300 aa, Listeria monocytogenes
MNVNAETEDATLLLDGLLQNVAIIRFDTNKKVTYANALFAEAMGYSEEEMLKLSHPDLCFPDFVQSASYKAMWTNLLAGQKFQNKIERKNARGERVWFEATYIPIIREDTVVGVAKIATDITRREETVHDFASGLKSMATNLKEHSSVGKTRSEALLELVKSITKESNENTDTLHDLQTEAQNIHGIINTINGIASQTNLLALNAAIEAARAGDAGRGFSVVAEEVRKLSSRVEEAIKEVEKSVNGITQEINTISSGTERVEAKVEESQEVLILSLEDFSQIESASTALDQNAGAFTKMI

SEQ ID NO: 2055 - protein, 180 aa, Listeria monocytogenes
MRITGERIYLRPFQIIDANQKLAFHLANKAFFEGYSMERDDRFYTIEEQQSLISRLEDFAASDVEYYYGIFLNDTDELIGTINLFSILRESLQSAFIGYFLDKKHNGNGYATEAVQLIVDFGFDILGLHRIEAGVMPKNERSKQVLLKAGFHLEGLAVQNVRINGTWEDHQVLAIINPGD

SEQ ID NO: 2056 - protein, 321 aa, Listeria monocytogenes
MKELLGLLKEGNKSALTAALVNTVVSIIKGVTYFFTGNIAMFAETLHSLGDAANQFFVFIGSALSKKRPTKRFPHGFGRMVNLVLLGAVIVVGIMAFETIREGFAHIIHPTSSTGFLINLTVLLLCTLLEFSVLVKAMHEIAHDVGLESKGLRLFKDSILNLGKAKAATKLVFLEDSVATGGGLLAMIAVIISHFTPFHQAEGIASMLIGVMMFIVVGKVFLDNAAGVIGESDQSMHLTVGQLVMSDPDVRDIQVLTVLKEGDVFHVDVEVELDPMLTLAEVDDIKDRLEESIGKLRGVADVLISFDEDDAIRNWEYGDGR

SEQ ID NO: 2057 - protein, 536 aa, Listeria monocytogenes
MTIVAMNEVVKSFTGDIILEKVSLQLEEGERVGLIGRNGEGKSTILKILKGTEGVDSGIVTSKKGARIGLLEQLSSVDPNIIVEHYLRTSFGELEDMEKELRSLEAEMATNASEKLMNRYGDKMALFGELGGYEMDANLNKVVNGLGIGKLLSQSWGDLSGGEKTKTALAHLLLQKTDLLLLDEPTNHLDLMAVEWLTAFLQHYSGTVLVVSHDRYFLDEVVEKMVELENRELIVYHTNFSGYLKEREERLLREFQDYKDQQKKIKKMQQAIKRLRQWAMQANPPNDAMFRRAKNMERALERMEKVKRPVLTQKQMQLQFDEAGRSGQEVVVMENLSKSFSEKTIVQEVSLQIRQGERVAIIGENGAGKSTLLKIMEGKVVPDDGVIKVGASVKIASLSQQMEELNEEMTVLDAFRDKVAVTEGEARQMLAGFMFYGEMVFRKVRNISGGERMRLRLAQFINMPVNTLILDEPTNHLDIASREVLEEAIRAFSGTIITVSHDRYFIDQLCSKVIWLENKQLTVYEGNYSYATSKRR

SEQ ID NO: 2058 - protein, 176 aa, Listeria monocytogenes
MEITIVKGDITEQEVDVIVNAANSGLLGGGGVDGAIHQAAGPDLLKECQEVINRIGSCPAGEAVITSAGDLKATYIIHAVGPIWKDGEHQEANKLASCYWKALDLAAGKDLTSIAFPNISTGVYGFPKKLAAEVALYTVRKWAEEEYDTSIKEIRFVCFDEENLKLYNKLINSEVV

SEQ ID NO: 2059 - protein, 640 aa, Listeria monocytogenes
MKITFPDGAVKEFEPGVSTADIAASISPGLKKKALAGKLNGELLDLVTPIHEDGAIEIVTPDHEDALGILRHSTAHLMAQALKRLYPDVKFGVGPAIESGFYYDIDTEAVISDESLVEIEKEMQKIVRENVPIEREVVSREEAIKRFKAIGDQYKLELIEAIPEDETVTIYTQGEFFDLCRGVHVPSTGKIQVFKLLSVAGAYWRGDSNNKMLQRIYGTAFFDKNGLKEFIQMQKEAKERDHRKLGKELELFTNSIEVGQGLPLWLPKGATIRRVIERYIVDKEERLGYNHVYTPIMANVELYKTSGHWDHYHEDMFPTMKMDNEELVLRPMNCPHHMMIYKNDIHSYRELPIRIAELGMMHRYEMSGALSGLQRVRGMTLNDAHVFVRPDQIKDEFKRVVELILEVYKDFDITDYSFRLSYRDPKNTEKYFDDDAMWEKAQAMLKSAMDEMEMDYFEAEGEAAFYGPKLDVQVKTAIGKEETLSTVQLDFLLPERFDLTYIGEDGEKHRPVVIHRGVVSTMERFVAYLIEEYKGAFPTWLAPVQMEIIPVNADAHLDYAKGVQDKLQRAGLRAEVDDRNEKLGYKIREAQTKKIPYALVLGDQEVEAGSVNVRRYGSKDSETMDLDAFIAQVVAEVSKY

SEQ ID NO: 2060 - protein, 307 aa, Listeria monocytogenes
MDNIERTLGQLFEGRDFEKEYQGLKQQVLHYQPIQDFFKEHKEEVTEQLVNQNLSNLYEFMTQHKKFTEQEETLMPGYAPKLVLNGEFITVTYYPTKEKIEEDKRRAVERRIRSLYMPKQVVDANLADFYTDEESRQLALVEAYQFLNNYPPKSGERVKGLFIHGSFGTGKSYLLGALAKELALKGISTTLVYLPEFMREVKQSISDNTVGEKIQFAKETEVLMLDDIGAESMTAWTRDEVLGAILQFRMQEELPTFFSSNYNMDQLENHLMFAQNGTEEKLKARRIMERVRYLSKEVNLEGKNRRF

SEQ ID NO: 2061 - protein, 498 aa, Listeria monocytogenes
LKTIHFDMNKYETHVDLEYLKEHGRVEKISDGVIFCSGLENAALHQAVLIDERHRGVILELNEEFVGIGLIDKTNDILEGMHVGVSGKFIEVDLFEEMAGRIIDTTGKMLYEESEEKPTATSPLFCVTPAIMTIDSVTRPLNTGLAVIDSITPIGRGQRQLILGNRQSGKTQIAVDTIINQHDQNVHCIYVAIGLKAAYIAEVIETLRNHGAMEYSTVVATAASDSLTAQYLTPYAGMALAEALRDQGKDVLIILDDLTKHADAYRAITLLFNRPPGREAYPGDSFYIHSSLLERAVQMNEEHGGGSITAIPMIETLSDDVTAYIPTNVISITDGQLFLKSDLFNRGQKPAVDVGVSVSRIGGDAQHPIIRKLSKNLTLILSQFEELKELLDFGNALDDGSMKMVSDGRLLTELFKQKILSPLSVTELIVILYAFQNGFLTKIPPANIQTFKGLLLEKAHMHKDFESFSAQIEAINELNESHVEMLEEIIRETGRLFS

SEQ ID NO: 2062 - protein, 458 aa, Listeria monocytogenes
LTEFWMELQAVDSYQVKASGILTGADRKIITMLYQPLMGAECLALYQTLFTEVEENRLWSEAHSHVQLLNMLDISLKALFEARLKLEGLGLLKSYVKTENDQRFYIYEILPPLSPEKFFSDGLLNIYLYSKIGNAQFQRLRRFFADEVFETDTYSEITRSFQDVFEPFKGGNSAVTAESGQKLVDKVTPKEIEFDGASFDFNLFLSLLSPGMISREKITKEVRQTILKLNGIYQVSEKDMPSYLYRALDANGEIDIVYLRKIVREGYTIEHGATPKLQMKQETTVNKEPEETLNDEEALQVYLESITPFQLLVDISDGAVPAETDLRVVEEVMNQQNLPVPVMNVLIEYVLLRLDRKLSKNYMMTIAAHWKRKNVKTAKEAMDLAWQEHEKYKRLQEEPATPKTNNYKRNYQKSTRKEILPDWFDKEQVAPAENKMTDKEKQTLEEQVREIKERLNKR

SEQ ID NO: 2063 - protein, 360 aa, Listeria monocytogenes
MKKWKIIISVIILALVVSACGNSSKETKSEPSDSKKLMDQPYSKTDFLMGTVVTLKIYDKGKEDVLDKGFDRIKDLAAKITTSDSEKTSEVDKINEQAGKKPVKVSEDVYYLIQEGLKYSENSGGSFDITIGPLTSLWHIGFSDARKPSQAEIDAVLPLINYKDVKMNDKDQTVYLEKEGMELDLGAIAKGFITDETLKVFKENKVTTSIIDLGGNIYVQGNNPNGNKWNVGIQDPFSPRGSVIGKLPESNMSIVTSGIYERYLEVDGKTYHHILDPKTGYPFDNDIAGVSIVSKKSIDGDGLSTATFSKGIKGGMDYIEQFEGVDAIFISKEKKVYETSGLKGQFELTDKDFQMDTLKK

SEQ ID NO: 2064 - protein, 319 aa, Listeria monocytogenes
MSIPSFLKLVEIQTKIASVFPFMLGTLFVVYQYDMFKPINTLIIFGSMLIFDLTTTAINNYMDYRKATDNHDYDYRTTSNVIGQEQIPVRTVIITIFLMFFIATGLGVWLVFRTDLLVLLIGFVCFCIGILYTFGPVPLSRMPLGEIFSGVTMGFGIFFLAVYVNAYDAGIANLLWQGEMVTIQFNLIEIIRIGVVSLPCIFTIANIMLANNLCDLDEDIRNHRYTLPYYIGRKMGVLLFNTLYYASFLAVVVSVAINFLHPIMLLSLITIYPVYRNLVKFNKEQVKSKTFVIGIRNFVLINATLTILMAVSVVLQQLT

SEQ ID NO: 2065 - protein, 266 aa, Listeria monocytogenes
MIEKLILGRFVPGESLIHGLDARTKLLAGFYYIGILFLANNWWTYALMVLFTLMVVQMTGIKLKVFIKGVKPLIWLILFTVVMQILFASGGTIYFDWGPFTISSFGLLNGVFVFLRFVLIIIMSTVITLTTTPMNLTDAIAYILRPFAVLKVPVNDIALMISVALRFIPTLMGETDKIMKAQRARGVDFGEGNLFEQMKVVVPIFIPLFVSSFNRAEELADAMEARGYQGGEGRTRFRILHWHLGDLIAACVMILLTAGLVILRTS

SEQ ID NO: 2066 - protein, 102 aa, Listeria monocytogenes
MAKQKIRIRLKAYDHRILDQSAEKIVETAKRSGASVSGPIPLPTEKSIYTVLRAVHKYKDSREQFEMRTHKRLIDIVNPTPQTVDSLMRLDLPSGVDIEIKL

SEQ ID NO: 2067 - protein, 209 aa, Listeria monocytogenes
MTKGILGRKVGMTQVFTENGELIPVTVIEAAQNVVLQKKTVETDGYEAVQIGFEDKRAILSNKPEQGHVAKANTTPKRFIREFRDVNLDEYEIGAEVKVDVFAEGDIIDATGVSKGKGFQGVIKRHGQSRGPMAHGSRYHRRPGSMGPVAPNRVFKNKLLPGRMGGEQITIQNLEIVKVDVEKNVLLVKGNVPGAKKALVQIKTATKAK

SEQ ID NO: 2068 - protein, 207 aa, Listeria monocytogenes
MPKLSLLKQDGTNAGEITLNDTVFGIEPNEKVVVDVILSQRASLRQGTHKVKNRSEVRGGGRKPWRQKGTGRARQGSIRSPQWRGGGVVFGPTPRSYAYKLPKKVRRLAIKSILSSKVNEEKLVVLEGLTFDAPKTKEFAAFLKNISVDTKALIVVAGESENVELSARNLQGITVIPAESISVLEVAKHDKLIITKAAVEKVEEVLA

SEQ ID NO: 2069 - protein, 94 aa, Listeria monocytogenes
MDARDIIKRPVVTEESTSILDDKKYTFEVDTRATKTQVKYAVEEIFDVKVAKVNVMNYKGKLKRMGRYAGYTNKRRKAIVTVTADSKEIQFFEV

SEQ ID NO: 2070 - protein, 343 aa, Listeria monocytogenes
MEKMIQTIILYSVFAVGFLYLLHFTLRKLENILTSFFYEVSQDQSLEKESLLRRLKRQKVATTQEEQKNRQLAIESEQKEVLFLEEIDQLIAQNKSYEQQLQAWENEQPKQIIEVPTFETTPHAPYKSLSSYINEIFQQVFIESEEDEARLFTEAIREFDALVRTEKIRCALPYKVILHLFEMYSPEQLHLFAQSFQRYSERSSKLPVKQIYQSSYLSPEQKLKVMQEEGTLDELDAEFIQFLFYMMTHYSYRQTRNLYRNFLEVYNIHFYRGLICIHVASKGSANHFEKLWQPAHRSYKIEYQVQKELIGGVIIQYGSKSIDMSYQELIKRSTEKMEAEVKL

SEQ ID NO: 2071 - protein, 277 aa, Listeria monocytogenes
MAIKKYKPTTNGRRHMTSSDFAEITTSTPEKSLLRPLKKKAGRNNQGKLTVRHHGGGHKRQYRVIDFKRNKDGIPGRVATIEYDPNRSANIALINYADGEKRYIIAAKGLEVGQTIYSGAEADIKVGNALELKDIPVGTVIHNIEMKPGKGGQLVRSAGTSAQVLGKEGKYVLIRLNSGEVRMILATCRATIGQVGNEQHELINIGKAGRSRWMGKRPTVRGSVMNPNDHPHGGGEGKAPIGRKSPMSPWGKPTLGYKTRKKNNNSDKFIVRRRKKK

SEQ ID NO: 2072 - protein, 313 aa, Listeria monocytogenes
LKKGIILLVSMLFIAVVLTACGDNKSAGSEQVEMRTYTMANGKKVEIPAHPKRIVASEYLGNIVLLGMKPVGARAKQMENPFLKGKVDGIADIGDPVSAEKVAELKPDLIIVSNDDEFEAMSKIAPTVLIPYATSKNVEEDVRQIADLVGEKKAGEAWLDKFHQKAKESRAKLAGKLDPNETVGIYEVQDKDFYVMGQNMGRGGQAIYNALQLKAPAKIQKDVLDGQDWQKISLEVLPEFAADRMFVTTTSSGNAKDGEETLKDLTNSPIWKDLPTFKAGNVYQMDFDTMFYYDPLAVEGQLDIIVEKLLASN

SEQ ID NO: 2073 - protein, 341 aa, Listeria monocytogenes
MDKSKQIKMNTRPTVAKFILSGGLLLLLILALFGIAVGAADINLSTVWDALFHYNSSDTQHQIIRSLRVPRVVADMAVGAAFAVAGAIMQGITRNPLADSGLLGLNAGSTFMVAVCFAFMPWLSYNSLILFSFVGAAIGAFLVFGVSSLAGSAMSPTRLVLAGAAVSSLLTALSEGLAIYFQLSQDLAFWYAGGVAGVKWSQLAAIWPWLLGALIAAILLSKSITILSLGDDIAVGLGEKTTFVKIASMVVVLILAGLAVSVVGPVGFIGLIVPHLVRFLVGVDYRWIIPCSAVVGAFLTLAADILARTINPPYETPISVIFALIGVPFFLYVARKERRNL

SEQ ID NO: 2074 - protein, 340 aa, Listeria monocytogenes
MYMTIAEKRKKSRRIWTLIILSVLIFCTFTYSVNAGYSKLPFLEVIKSFFGMADAGTQLIVTEFRLPRIVIALLVGAGLAVSGTILQGISGNGLADPGILGINNGAGLAVMLYISFFPSTMDVPVLFMPFIGFIGAILTAFVVYGLSYSRSEGLLPNRLLLTGIAVAAAIAALITLLTVRLDPQNYQRYAEWMAGNIWASSWQYVFALLPWLIVLGAIAFMKVKTLDVLSFGDQVATGLGVRVEREKFVLLIVAVGLAAACVSVSGGIAFIGLIGPHIARKLVGSAHRWVMVTAALSGGLLLLLADTIGRLIIQPSEIFAGIVVAIIGAPYFLFLLAKAK

SEQ ID NO: 2075 - protein, 269 aa, Listeria monocytogenes
MKITSISVQQKNKERYNIFIDEKYNFSVDEEVLARYQLMKGKVLTEADIEEIKQADMVRKGLNKAINFLSHRVRSEKEIRDYLRKQEMEPFAIDEILKKLANMDYINDFEFAELYTKTQIKTTLKGPRTIERELVEKGLTREIISRVIEEYSDEAQLENATKQAMKIMKRNNKSAKKMLQQKIITDLIQKGFTSELAKAAATEATSELDVADEAEILQKQIEKTMRKNKRYKPSIAKQKTITSLMQKGFSYDTIQSYLTENEISFEEEE

SEQ ID NO: 2076 - protein, 300 aa, Listeria monocytogenes
LHILLTGATGFIGDHLVHELEKSDHELYILTRQKLKNRANVHYIEWLNEDKLPNLEDLPVDVCINLAGAGLMDEKWTYDRKKVIVNSRIEATSALLSIVKKMKSKPKLWINASAIGAYTSSKSTIYLDTEENTYADNFLGKTVYEWEKTASAASDLGIRVVYARFGLVLGTNGGSFPVFEKLFQTYTGGRFGNGRQWYSWIHVDDVVAAILFIFDHEQINGVVNFTAPHPVQEKKFAERLGKKMHKPYKTPVPKKIIKFILGERAMTILDSQRAYPEKLMSNHFEFRFETLQEALDDLLD

SEQ ID NO: 2077 - protein, 865 aa, Listeria monocytogenes
MKEKLMQAYAWFQKNSTVVKIVFITFVMAFVIFEIINIATGIDYPSLKENLTSQSPEQIFIMFIVGLIAVTPMLLYDYVIVKLLPGKFSPSHVIASGWITNTFTNIGGFGGVLGASLRASFYGKNASHKEILLAISKIALFLVSGLSIYCLVSLATLLIPGFADHFVNYWPWLLAGGLYFPILFTITKWKSKSLFVDLPIKRELTLIIASLLEWGFAFGCFAIIGTLMGEPVDIFKVFPLFVIASVIGIASMVPGGVGTFDVVMILGLSQLGVSQELALAWMLFYRIFYYIIPFVVGLLFFVQKAGKKVNDFLEGLPLLFLQKVAHRFLVIFVYGSGLLLILSSAVPNAIYHVPFLYKIMPFNFLFTSQITIVAFGFLLLGLARGIECKTKKAYIITVIVLGCAIFNTLARVFSMKQAIFLGIVLLCLFLARNEFYREKLVYTWSKVIIDSIIFIVCLAGYIVIGIYNSPNIKHSKEIPDYLRIASEHLWLVGFVGVFIAVVSLVIIYIYLSTTKEKLGSPFEAVKVREHLAKWGGNEVSHTMFLRDKLLFWAAEGEVLFSYRIIADKMVIMGEPTGNMDKMEAAIEEVMMNADRFGYRPVFYEVRGTMIPYLHDHGFDFIKLGEEGFVDVQNFTMSGKKKKGERALMNKLEREGYTFEIIEPPFNHDTWTTLRAVSDEWLDGREEKGFSLGFFDTYYLEQAPIAIAKNGEGTIVGFASMMPSYTDEMTSIDLMRYSKEAPSGIMDFLFINLFEKAKEDGFQTFNAGMAPLANVGESKYAFLGERLAGLVYRYSQGFYGFKGLRNFKSKYVTEWEQKFVAFRKRSSIAFTMLQLMILVGKKRPLANSQVVLDFPLEEETKKPDSE

SEQ ID NO: 2078 - protein, 80 aa, Listeria monocytogenes
MDLVVACSVIGAALAIGLATLGAAIGQGIAVSRATEIIGKNPNAKKEVMGGLFLGLLMIVALMLFALAIAVILLWVNPFI

SEQ ID NO: 2079 - protein, 224 aa, Listeria monocytogenes
MQVQKCRFFVLLLPALYLLYGISLALQFGNNADLINTIANSCLLFLATLILTNMARLKNWIDFIWFCVFILYIIILLHLVAYIAVGDFVNSTYTGNFHIQKEMINLIPFTTIENTFQQTLPTMPTIIQIFGNVLLLCPLSFFMLYFKITSTAGKTLLVIFLTSCGIELLQFAQTTMITGFESISLPPKRSTDIDDIILNTLSGLIGILLAYALPSVRKRINKRR

SEQ ID NO: 2080 - protein, 68 aa, Listeria monocytogenes
MITYYFNNKADDKGRHEVHERTCRYLPENKTEIGVFSSCQDAIRQAKLQHFQKEFDGCFWCSRSCHKG

SEQ ID NO: 2081 - protein, 803 aa, Listeria monocytogenes
VTFNHKKMEPKWQQYWSEHNTFKTTEDKNKENFYALDMFPYPSGAGLHVGHPEGYTATDILSRMKRMQGKNVLHPIGWDAFGLPAEQYAIDTGNDPEEFTALNIANFTRQIKSLGFSYDWDREINTTDPEYYKWTQWIFEKLYENGLAYEAEIAVNWCPALGTVLANEEVIDGKSERGGFPVFRKPMRQWMLKITAYADRLLDDLDLVDWPENIKDMQRNWIGRSEGAEVTFKIKDSDETFNVFTTRPDTLFGATYTVFAPEHELIEKITTPEQKEAVEAYKKQVELKSELERTDLAKDKTGVFTGAYAINPINGEEVPIWIADYVLIQYGTGAIMAVPAHDERDFEFAQQFGLNIRPVLEGGDVTKEAFTGDGPHINSDFLNGLAKAEAITAAIDWLEKEGIGSRKITYRLRDWLFSRQRYWGEPIPVIHWEDGETTLVPEEELPLLLPKATEIKPSGTGESPLANLHDWVNVTDENGRKGRRETNTMPQWAGSSWYFLRYIDPKNSEAIADKEKLAEWLPVDVYIGGAEHAVLHLLYARFWHKFLYDIGVVPTKEPFQKLFNQGMILGENNEKMSKSRGNVVNPDEVVEKYGADTLRLYEMFMGPLEASIAWNENGLEGARKFLDRIWRLLVTEEGTLAEKVTTDANANLEKAYHHMVKTVTNHYENLRFNTGISQLMIFINEAYKQDTIPKQYVEGFVQLLSPIAPHLAEELWEILGHTETISYVAWPTYDETKLVEDEVEIVLQVNGKVKSKITVAKSLGKEELEKIAQEDNKMKENLEGKTIRKVIVVPGKLVNIVAN

SEQ ID NO: 2082 - protein, 297 aa, Listeria monocytogenes
MDVTQLKMLHNAKVISEIKKGFSVDRKYQVDETYLVRVFPIDLLQERKQEFKIIQALDSQTPFVPKAYDFGFIEREGYMIISYLRGEDAESGMTHLSHSEQFKAGFSAGEILREVHKIPLDIPKMNWLDFQTAKFKRKVEELKELEITASFLTDTEKFVYKNIARLKNRPICLQHGDFHPANIILNNKKFVGLIDFNRLEFGDPLFDLAKIGFFTTEVSIPFARGNILGYIDKEEVTDFWNLYALYTAMHITSAVSWAAKNESRNFKKLMDYAVKTAASHDNFQKIVPNWMNEEEFK

SEQ ID NO: 2083 - protein, 208 aa, Listeria monocytogenes
MTEKKIDFKKEEKKFYAPKRKPERIFVPEMNFLMVDGKGDPDGEEYQKAVQSLYAIAYTIKMSKMGETRLNGYADFVVPPLEGFWWSEEKFDLKDRDAWLWTSILRQPDFVTEEVLEWAKEVAQKKKPDVDTSRVKLVRFEEGECVQMMHIGPFSEEVKTVAELHQFMETEGLHNDTGAVRKHHEIYLSDPRKADPEKMKTILRLPVS

SEQ ID NO: 2084 - protein, 129 aa, Listeria monocytogenes
MYFLYVGVFGALGGMCRYAMNLWLGGGDFPSATLAVNLIGCFLLAFLMRFLAEKSRVSLVLLNGIGTGFIGAFTTFSAFSVDTIQLVQSGAWLFAVSYVLASFIGGLIMVKFGRMLSNKLLNRGEHRVG

SEQ ID NO: 2085 - protein, 376 aa, Listeria monocytogenes
MTKKLVICISLIAIFLSGCSFSEPSTSKSNITEKTLNGATFTFFDVGQGDSTLIQAEDGTTILIDTGRQDDDRILTYLKEANVKKIDLLLLTHPHADHIGNADKVIATYNPKEIWMDGLTFSSSIYEKVIDAALASDAKYKEPRRGEKATFGPFNLEVLSPDKLENDANNDSIAVKITYKDISAIFTGDAEKGREREMVDSGANLEADILDLGHHGSSTSNQPFFLDKVKPQVAVYSAEMANSYGHPHVEVLEWLKERDIKTYGTDVNGTVIIETDGEKIHVQTEKSGTPKPGSSYNKENSTQKTEDATSEELPESINLNTASSEDLQLLPLIGPALAEKIIAERPYQSIDDLKKINGIGDGIVRQIKEQGIAVTK

SEQ ID NO: 2086 - protein, 405 aa, Listeria monocytogenes
MNSDLTNKKILTRSSKVMLVLGIVLIAANLRTPITSVGPLLGMIQSDLHLTNTMAGLLTTIPLLAFAGLSPFVSKLSRALGMEVLIFVALLTLVLGSLLRPFGGELNLFAGTFMIGLAIAVGNVILPSLIKKEFPFKLGLMTGVYSISMNLCAAIAAGLTVPIAMNNRFSWHGSMVFWAILGIVALVIWLPQLKYNQRSTEKIATHLVTTSVWKSPLAWKISLFMGSQSAIFYISIAWLPNILADQGLSSTSSGLMLSLMQFAVMPITFIIPIIAGRMKNQQLLVGISILFFLIGIFGIMFASGSILILSIAIIIYGIGSGMSFSLSMMFFNLRTTSATESADLSGMAQSIGYLFAASGPILFGTLHDALGSWQPTLYVLVGITMLMLYCGLDAGRNKFLFSQKK

SEQ ID NO: 2087 - protein, 229 aa, Listeria monocytogenes
MVEKIERKSLAEQVYDQIKAEITNGTWKIGERIPKEADLMAEFGISRNTLREAIRALAHIGLLETKQGDGTFVRNNSELNAIMQKRVRESTVQEILEIRHALDREAVILACDRRTEEDVETLEKYRQQCQLATEKNDVGAFVKADSALHLTIVKTAHNDLLLDMYVNILEEIQFSITSTTEMSPEANQHKGHAALVKAIEKRNKEQAAHEVTEYITLFKRIAAKNGEKK

SEQ ID NO: 2088 - protein, 348 aa, Listeria monocytogenes
MNWLEKLKENDTARRVLVFVLLGVVLYLLRSMIDLILLTFIFAFLVTRLENVILKRVRVPRKLIVIVLYSLVAVFLYVAIVHFLPILINQISQLVDSLVKLYNNPSDNTIVKWIVGFLKESNIQKYLQAGVDFIIASLSGIGSVGLSFFLALILSLFFSLEKERVTSFTGQFMTSKVGFIFKEAAFFGKKFVSTFGVVLEAQLMIALVNTFITTIALYLMDFPQLLSLSIMVFVLGLIPVAGVIISCIPLVLIAYSVGGFQDVVYILITVVIVHAIETYILNPKLMSSKTNLPVFYTFIILIFSETFFGVWGLIVGIPVFVFLLDILEVRNAEDLKKRTLFGRKKKVD

SEQ ID NO: 2089 - protein, 275 aa, Listeria monocytogenes
LANVAIDTVITDMDGTLLVKKGDQIHPLNKEVLMEWQKKGKKLFLATGRLDLAILPFIHELNIKTPVISCNGGLVRDFTTGEILYKSNIELDLIHTVLETLEPLDVNYHIYTTERILGPSNTGKIAFFNELNKTLPENEQVPITLTTDPFSVLREGEFPLKVLVIESDLEKRAEIKAALEGLPLSVLASASNLIDIMNEGIDKAKGLTYLAEHGYINLDSTIAFGDNENDVGMIELAEIGVAMENGIPLAIEKADKIAKHHDIGGLGLFMQEEIL

SEQ ID NO: 2090 - protein, 768 aa, Listeria monocytogenes
MKPTWKIGIIVAAVPLIIIAVVLWGSFKEARYNLVSLPDDGVVLNNEQETLQFQKGNTLYRSWNSDQLIAKNDKEDTRNEIMESTILYLNKEALMFTKSVPVIDTNGVSSKLKGRQVYQQTNSSYKYKNSEIVENSIVKLANRQYYLNADATLYLGGKEIKKVTKPLLLIDKTGSVTIYENKKKSRFLGHMTLKVNDKTVLDASNETYTVGERKIDLASFGGTDNEKIVVKEDEKKEDKKKTAESAKKTASNTSQSENESNQTTKGTGNQLNATKKYGNNLNVGNGTSDSEPNDGKDTKNNGSGSNANGGTNQSGLNEIDDYEAVLRKIEDLNKKLERNIPVLRIGYIAPGVTSVKVSYNYADPNNTLIGVTKISAVDEKTGKTVNTQYVSAVDTEATLKGLSPNGKYHLEFTYQYDLGTNKGIQEVKMQSDSFTTQTVAAIYQMQSVTSTTMKVNIALDAQIDDVKRARIKVTKSDGDFFYMNVSANFLNGNGEILNATGLKPSTAYQFQTVIEMKNGETIELNSSEKYYTMQATVLKNLKASQSVNKVLQVQYDWSSADYTLNQAIIELEDEEDNTEVDYQIVNQEKGNIHLVPDTKSELINLKAKLVLKTTNNNTKESKTFEYPVKQEIEYDKQAKLTMDLTPFQTEENSEAQTEKQDVVAEKETNGNDLTAKMEDVLAPQNATYDMSFSMQRKALETYQLAFERKIAGIDDDNWTMWKSQQVTTDEAGQVKVTETISKLAKDSFDYRVAVYDAQGALQLYVYQK

SEQ ID NO: 2091 - protein, 279 aa, Listeria monocytogenes
MRKIKIITDSTAGLTLEEAAKWNIDVLYLTVEIDGKVYNPKTDITPEEFMVRMAETKELPKSSQPAIGSFVEAYEKYTAEGYEILSIHLTEKLSGTVNAARQAADMVEGNITVVDCDYTARGQAFQVLKAAEMAQSGDYSVEEIHAKINDIRDKTKLYIVVVTLDNLIKGGRVGRMQGFLGSLLNIKLIAKLTDGQLEEETKVRSNKKVLQYCLNLIKDEPKKIQHLDVVHANGLNLADDFIAESKEITGLTEIPLFFADPVISTHAGTGAFAFMYYTD

SEQ ID NO: 2092 - protein, 261 aa, Listeria monocytogenes
MTKKKWLWLTGSVLVIALLVGAVFGIKYYKESKEIPINLVAMGDSLTEGVGDENKDGGYVGIIPKKLEEEPNVPSVKTSNYGVSGNKITQLEKRLKTNKDFQEDVKNANVITITIGGNDVMAILQSRLLNVNVDDFTKANKEFQQELETLLKDIRSYNKDAAIFLMGIYNPYTTYFSDIKQFDEIISDWNKASKKTIQQDSNAYFVPIAKVLEDRNADNKDKPNSLLSDDYFHPNHKGYEKMTSELDKAIVKQLNEGNIPK

SEQ ID NO: 2093 - protein, 204 aa, Listeria monocytogenes
VQRETRSAPKKPKRNYWKWVCITLISVLLISAGWIYVAVFKLSPQDEPTPSLISNKSMVEFQTSTTKADLNQLISSYIEDFSKDQDIGYKVFVANNVNFTAEAEIFGEPVELRLKFSPEVVDNGNVELTLKDMSVGALPLPVSYVMNYVSKNYKFPDWVTIMPKKEKIYLSLDKLKLQGDTKVRADTLNLKKDDISFTLLVPVK

SEQ ID NO: 2094 - protein, 177 aa, Listeria monocytogenes
MTKESLEKATFAGGCFWCMVKPFDTQPGIEKVVSGYTGGHTVNPTYKEVCSGTTGHTEAIQITFDPAVFPYEKLVEVYWQQTDPTDAAGQFVDRGDSYRPVIFYHNEEQKEIAEKSKAALDASGRFKKPIVTEIAKAETFYPAEEYHQDFYKKEKAHYEGYQVASGRAAFIDANWKG

SEQ ID NO: 2095 - protein, 145 aa, Listeria monocytogenes
MDESKKNERLQQLTDIQYNVTQKAGTERPFQNEFYDNEVKGIYVDIVSGKPLFSSNDQYDAGCGWPSFTKPIDEAEVIEHRDLTHGMIRTEVKSADADSHLGHVFPDGPQDKGGLRYCINSAALRFIPVDKLEEEGYQAYKKIFE

SEQ ID NO: 2096 - protein, 301 aa, Listeria monocytogenes
MLKIAVVGLGGIAQKAYLPVFAEMENIEVHLYTRDAQKLKHLSEKYRFDHYHQSIHSMIESGVNAAFVHSSTASHPEVIRTFLANHIPVYVDKPIADNLAEVEELTRLAEEQNTLLMTGFNRRYAPKYQELKALTDTNMIIMQKNRAAQPGEARTFIYDDFIHVIDTVRFLLDAKIEQLHVVPVWQENLLASITVQITAGGKVATAIMNRDSGVNEERLAVMTPSAKYEVENVTETHIYEGTTERFERFGDWETTLYKRGFVSIIQAFLTAVRNGEKAPISKEDALETHRLAEEILRKIEN

SEQ ID NO: 2097 - protein, 306 aa, Listeria monocytogenes
MENKQNGQLGGIIAGALAYVCWGVLPIYWKLVTNVPPMEILAYRIIWSFIFMLFLIVCLRKASMVFQETKDVLLKPKTLIAIIAAAFLVTANWYLFIYTVNSGHVTEASLGYYINPLVNVLLATVILKERLSRGEIIAVISATIGVLILTWHLGSVPWAAIGMAVTFSLYGLIKKVVSVSVWTGLTLETMIITPFALIYVIFFATNGLMQYAAQTNIILVGAGVVTAIPLLLFATAAKKISYTMVGFLQYIGPTLMLALGVLLFKESFDHMQLFAFMFIWLALIIFTISHIYSAAKIKQLANAAKK

SEQ ID NO: 2098 - protein, 213 aa, Listeria monocytogenes
MKIGIIGATGRAGSRILEEAKNRGHEVTAIVRNAGKITQTHKDINILQKDIFDLTLSDLSDQNVVVDAYGVSPDEAEKHVTSLDHLISVLNGTVSPRLLVVGGAASLQIDEDGNTLLESKGLREAPYYPTARAQAKQLEHLRSHQAEFSWTYISPSAMFEPGERTGDYQIGKDHLLFGSDGNSFISMEDYAIAVLDEIERPNHLNERFTVAGK

SEQ ID NO: 2099 - protein, 233 aa, Listeria monocytogenes
MVLLGALVNGLGILIGSVIGMKLHNIPERMKDTVMKGMGLSVIVLGIQMAFKTSNSLIVILSICFGAVIGEWLNIDYHLNQLGHWIERKVGAKGKSNVSKGFVTATLIFVIGAMGIIGALDSGIRGNHDVLYTKSVMDGFIALLLSTTLGWGVMLSAIPVFLFEGIIALFATQINQFVPADLMALIIKELTATGGIMILAIGLNLLGLTKIRVANLVPGILVVALIVTGLYYF

SEQ ID NO: 2100 - protein, 296 aa, Listeria monocytogenes
MTTIKIALIQQKAVPNNKEANLKLAIQYIKEAHEKGADLVLFPEMWSNGYAPPFEDAFNHPLATGFGAERFKWLDEAIAADSAYVSTLKKLAKELQIGICATYLSKTEQNSQNTAIIIDRKGEIILDYAKVHTCDFSLEILLQSGEEFKVCEFDGIKLGVMICYDREFPESARILMLKGAEIILVPNACDMNPARLNQLNSRAFENMVGVAMANYPGEKWGRSTAFSPIIFDENGDYRDNTIIETDDFSEGIFIAEFNLDEIRTYRENETWGNAYRKPHTYTDLISLDVKAPFKRN

SEQ ID NO: 2101 - protein, 126 aa, Listeria monocytogenes
MTKPLKLVYTENGFDTGNFLIDDKMTDYSPADLMLMSIASCSAIVFRNILKKKRVEFTDLWVDATMERIPEEENRISAIHLHFKITGPILDPKALEKALKLTPKYCSMVRSVEKSILVDESLEIMP

SEQ ID NO: 2102 - protein, 214 aa, Listeria monocytogenes
MEGVENKVIVLAGMIGAGKSSYTELIANELGTKAFYESIKDNRILEMFYDDPKRWAFALQIYFLNTRFRSIKAALTDQNNVLDRSIYEDALFTQINFEEGNISEPEMDTYLDLLDNMMEELAYMPKKAPDLLIYLRGSLDTVLSRIALRGRPYEQIDDNPGLLEYYKHLHSRYDSWFASYDKSETLVINIDEIDINKPNDADYVMQLIHEKLKR

SEQ ID NO: 2103 - protein, 289 aa, Listeria monocytogenes
VWKKVVKYVKQNGIVQVGQAVSARVGRNDVSGNAAQLAYYMLFSIFPMLLIAATLLAYLHIDKDSVFNMIKEFAPDQIMDFLEENLNNLLTQKNGGLLSIGIIATLWSASNGMNAVMKSLNKAYGVTNKRNYVVQRLLSMFFTLAMLATVGATLLLLVFGQQIGMFLINHLNFSEDFLSFWNNLRWTVTLIVIFVVFTFLYWVAPNRRSTLISVLPGALFSTIGWTVASVGFAYYVNNFGNYSATYGSIGVIIILMLWFYLTGIILMIGGELNATLAIRKKKKELGEIN

SEQ ID NO: 2104 - protein, 268 aa, Listeria monocytogenes
MGEKMAIWRTKKPATKQKIVSDLQELGIKKGDTIIFHASMSKAHWICGGPVTVILALQELVGELGNIVMPAQTGQLSDPAKWENPPVPESWWKIIRRETPPFDPLVTPTRGMGVIAETFRTMPDVERSFHPYHSFCAWGKDKKQILANQPLAKSMGDESPLGKMYQLDAKIILFGVDNNNNTSLHLAEERSNAFPLIENQAAFLKNGEIIWEKYQEIDYNSEVFIALGRAYEKEHDFHPTTIIGAPTKIYDMRDLVDFGTKYFQTKNH

SEQ ID NO: 2105 - protein, 252 aa, Listeria monocytogenes
MITLKSRREIDEMKAAGKILADTHKELKKIIKPGITSWDLEVFTEEFLRKNGATPEQKGFEGYEYAICASINDEICHGFPRKQKLNQGDIITVDMVVNYHGALADSAWTYAVGEVPDDVKHLMDVTHKALYLGIEQAQVGARVGDIGHAIQTYVESENLAVVREFIGHGVGPTLHEKPDIPHYGTAGKGPRLKEGMVITVEPMVNMGAWKAKMDDNGWTARTVDGSLSAQYEHTFAITKDGPEILTYQGEND

SEQ ID NO: 2106 - protein, 169 aa, Listeria monocytogenes
MIENELEHAKKTEKIEFGVNRRLIFSSCLLWMAVGLLLYVVFSHIKGVNGIEEMILLVFIGLCVLRPLFRLINIAPTVELTERGVAYRGDFKSWNEIKKTELKKPAMMLFSQGRLIIMTSINGREEVAWDIVAADVSISLEELEKLIQSMRSTYTDDETIGMEIFVEKK

SEQ ID NO: 2107 - protein, 255 aa, Listeria monocytogenes
METVLKAHKVRKVYGSKGNLFSALGSISLEIQKGSFVGIMGPSGAGKSTLLNVLSSIDKPTSGEIEIGGKQISTMNGKELAVFRRDQLGFIFQDYNLLDTMTVKDNIVLPLALAHIKQAEIDQRFEIIARQFGIFELRNKYPTEISGGQKQRTAVCRAMITEPTLIFADEPTGALDSKSATNLLEGLSQAKDVRDSTIMMVTHDAFAASYCERIMFIKDGEIFTEIYRGTSSRKQFFQKVLDVLALLGGGENDVI

SEQ ID NO: 2108 - protein, 659 aa, Listeria monocytogenes
MLFKVALTNMRKNFNQYIVYFVSLIVCVLVFFTFVSLSYNPLIDTVFKRWELFGPAMFSSASLMLILFIIFFIFYSNSFFLKRRKREIGLYSLLGLRKSQIVLVLFFENAMLYMLATIFGVLIGIFSSKLFAMVLFWIVGLAIDAEFIISFKAIIDTMLVFFGIMLFTSVYAVFLVLRYNLNQLFKNDEKEEKVAKGSLVFMLIGLALIAFGYYVATRNIEESPIWLAYGFFDLILVILACVILGTWLMVRFGTPYVIRQLYNNKRFFYKGTNVLGITSLRFRLKKNASTIAMIAVLSATTLTIIGSMSSFYVRTINDISAENPSSYQVLNISAKNEKEIIQTIHDDQDHKLKKLMQAEMLSAEVEYKDIPKYKMHMDTFIHTIVSESEYNRIGERQQSDFVQSKKIAYGEAILLGKNTYYARPDIQEKWLTRKMVVQSNKSAAKKMPPIKVVDFRENSIFNTGISYETLVVSDEYYDDLERLFRPESVTMFDITNPNHSESLDKKVQTIVDGEPSLFSDNVSSYYTNYHLISTVVGSLLFIGIFIGIVFFLATGSIIYFKLVTDAVSEKGKFEILFKLGVTEKEIRKIISKQVWPIFVIPLFFGIAHSMAALWGISINLMDNIKYPVLIGTGIYIVCYTAYYFLCINSFTKIVMANKK

SEQ ID NO: 2109 - protein, 188 aa, Listeria monocytogenes
MKSENKFFSGAFGWIKIILIALILAFGIRYFLISPVTVNGKSMDPTLHDGEHLFINKVSDPKRFDIIVFPAPDEENAEYIKRVIGLPGDKVEYKEDQLYINGKKYDEPYLDSEKAALKNGFLTTDAEGDPNFTMADIPNSDGSLTVPKGELFVLGDNRQVSKDSRYIGFISQDTVLGKVISFGKSLER

SEQ ID NO: 2110 - protein, 419 aa, Listeria monocytogenes
LFKFNDEKGQLKCSFCGKTQDQVRKLVAGPGVYICDECIELCNEIIEEELGISEFVDFGEVPKPQEIRHILSDYVIGQERAKKALAVAVYNHYKRINSNETKEDEVELSKSNICLIGPTGSGKTLLAQTLARILNVPFAIADATSLTEAGYVGEDVENILLKLIQSADYDVEKAEKGIIYIDEIDKVARKSENPSITRDVSGEGVQQALLKILEGTVASVPPQGGRKHPHQELIQIDTGNILFIVGGAFDGIEQIVKNRMGEKVIGFGTDNAKLKDDETYLSRVVPEDLLKFGLIPEFIGRLPVIATLEQLDEAALVSILTEPKNALVKQYKRMLELDDVELEFEPTALIEIAKEAIERKTGARGLRSIIEQIMLEVMFEIPSRDDITKCIITEKAARGEEEPQLQLEDGSIIPIKTSA

SEQ ID NO: 2111 - protein, 427 aa, Listeria monocytogenes
MSVKWEKQEGNVGKLTFEIEQEKVKEGLDRAFVKVRKTLNVPGFRKGKVPRQIFNQRFGEEALFQDALDILLPEVYSAAIDEAGIDPVDTPQVNIESMEKGETWVLTAEVTVKPEVKLGDYKGLEVEKRETELTTEELEAELKQLQERQAELVVKEDAPAENGDTVILDFEGFKDGVAFEGGQAENHSLELGSGQFIPGFEEKLVGLKAGDEADIELTFPEEYHAEDLAGQPVVFKVKLHEIKTKEVPALDDELAKDIDEEVETLDELKEKISKRLQEAKEESVAQAKQEEVIAKAVENAEVDIPHAMVHHEADHLMNHFAQDLQAQGLTPELYYQFTGQTEEAMHAQMEKDAEKRVKMNLVLEAIAEAENIEPTEEAIDEEISTLAEKYGMEKDAVRAALGDMSELKSDLKIRKAIDVLLDSAVEK

SEQ ID NO: 2112 - protein, 312 aa, Listeria monocytogenes
MSGSGAFFPMSVKKFLEKGITSLSEEEKMSTLHYLENAYHQEPCNEEIVHRLIQFYNQTDKTKKAQEIGQNFLTMNGYNKEILGELSVTFMKEDNMDTYFTLVRHYMEEEKKEATEEIADNVIPFPKQFVPRRDIREFASWQTTEQLEFLQEARFLEIDSFLSAFKDFLADDTFSPFVQSMIFELMQEKEINEDVTVRKIDKHGTFNPSLVPMLADNKFAEAIFAGLAEMLEHSNPSLLEQVIGIIQQHLFMLYPFELEPREVDVWVNAYYKWANAMYGNYCVISDDVNHLAVEEAISIIEELEIRQQNYFI

SEQ ID NO: 2113 - protein, 164 aa, Listeria monocytogenes
MKKILSLLVAFVCLWSILLPGQEADAAAKINSWDLVDSSKHLDYSGNSKYMSFIQSGANTWNAYKKGVIRPASGANKSDVYCSDISANNNINATTYSNGKITFNKKNMDKKNNAGKQNVATHELGHGLRLGHNASSDVMYQYSTSKTTLSTNDKQSYDAAYKKY

SEQ ID NO: 2114 - protein, 187 aa, Listeria monocytogenes
MLRFSGLVMTIALIVYIVFFLLRWLKRREKLEMIIFKTCLYVYACGVIKYAIFPLMLNAFLIEDTKIFVTGPYMNLIPFNSISEMFIAGRESAAFQIVANIIMFVPLGMLLPLCYPKLRWKSVFAISFIATVGIELAQLLQDLIYQSPFKFVDIDDVILNFSGGIIGYMIFVMFRPLLRKMGLYPNV

SEQ ID NO: 2115 - protein, 143 aa, Listeria monocytogenes
MNRKMRLLKGLMAFIVGISIIATPIITVYAASNKVAISMNRRAVNGATNGKYHSLNKGTVKLNVSAKGFGNSNPNSTVTLHKEKFGIDDYFGRVSISSGKNYFYKNKTKEFPTKANAKSSKYYLKAEKAMDWYTVKIEGTISN

SEQ ID NO: 2116 - protein, 1959 aa, Listeria monocytogenes
LKKNILVVIIVSVLAISAIVSAFFLMRDDAYAIETEGFTYSPKGKVVDFSSEAKYNDTWINNEKTITDKKEMKPINLARTLFLKDGRIQFLGKSVAVKSASDLIELPSKTSITESKGSYKAKSDSNKTLAQLPKGTVVKLAEGRYIILDNAYLKNKQGLNKKLPKNVLVSIDENKKVMLMGDKTIEELGGDDAYIEMENNHYHFDLKKEMLVSQTAKETDIDIRSIKVEIDDNAEKRSLKTAKETEKETTKDSTEKESEKQSNDASGQKSAQNNERSESKDDQTQDASGNNTNGSANNNTARSNGTGGSNSDTNGSQPGGTQNKPNEGDVNKANEIIKKLNEAENTNTFQVPIVDVNLTVKGQVAAAKLKLTDSSKRLNSLEAILYDSKNNIVKKEKLNSTKANQNFTFNNLKYGETYQVVVQGSYKSASNKNQDTIFFRQTVEAKPVVLTPKVTERGEDYMKAELTATELYGHIDKLVLKIKENNSNVITSQKVTVDASQLTKDGQVEVKFNSLSSDKEYIIEMEELIVDGKNVTDDGWYFISSTLKAKPTIEGLNLSYSTDKGEFVASPVNLVDRDESITSIRYVAYLEDDYKVNGSNAKEYAYSVVDANQKKTAVKVGRTVDMNDGNYIFVGYISGNNGQSDYTFATPASNSVVVGKKTKPTVEFSLKEAEQDKLTINYEVFDADNTLLFDNLTHPTLKLYKSDAQGMYSGNPVATVDLTKKSDITNLLEFDGLESEAYYVVVMTGSYNLDDGAGIMVDELIGQSSVFRTTEITKVNASFSLDSVDTTKVAINVKLSDAAVNLNDANLKIYEKKTNTLVKTVPLHGDFEKLMSDSGNSYLFENLSINKEYLVKVEDGYDSGMNHVPVEGQFIFKTKKESPETDKVLLDYKASEMKLGGLAGIAATEKPLIDDYNAVSSITYSIYKADDLNTPLVEQEVSTAADFEKNVYFDLTNKLLGRGYSYVIKADVVWNDNYEDHHIEISSDTIQIKKEKPTVEYEILSRTASEIKLNVYVEDEEESIVPGTLEITSTTGGNEQLQSGKNNVTLPLSSEGTTTIKTTGDYIITSGSSAISDIFMTKQLAALNTTTPQVGAKIAMDASGKSMTIAPEPNAVAKTSVMRTKYDLKDAASSKPDYSITKSGPNQFNTQNLNLPLGNIWFDNSYQLTLDMKMNYTENKIDNQNLANNYYLSIGNGASFVSSLSGAVSTTNNVNSADVFKVTKASTDLEGNISGVTFKNIWTDKYIAYRNGILISNSETPDSFKLIRQADGSYVPELSGRYVNFSVGLVTDEAAGSKIDLYSTQEKLEQVSEAISVKALEEPAISAENIGVYDKRVKLDVIGEDKDNTTVKKANKNELFVNVYKADGTTLVNSIRVDGLPTRDVSVTELSPDTDYVVKVEGKYDLLDGNGEKDKVYYSETIKTEKSLPSMTSTDYSWSPAYGQRAIKGKIDFADESSVLTNIEYRLYDAATISSSLSNLVALEQELGNKTPVSTFDNMTNNPEFSIYNGSGTQNFVSGKTYVIAAYMKTSLTRAPIFLSDAKAVYISPPSNVSAPITLENVSTREATLKFSYNDPQSYFVGGTNKDFQYVLKNTTTGTEVKKGSFQGGNTASWINTFEDLEPATGYTLTISTQYDNLNGGLVRAWNTSFNFTTDDEYVTSNSLTIQLDAGAKAVKLQAKEVRPGSTTIENIKMEFYELIDYGGNNERTQLVETKNITLPSSYPATIAADFNVAGKKKNQSFLGKMIVTYRTPTNEVKTYEKTSNFITLQEDIAAGLKSFKSVRATNDALEVKLDIPQDNSTDKGSYTYELKNENGDVIDTEKVAAEDISKTVSLSMEPTSNYTLTVINPDNQPVALYQGNNEENNLKAEIKKDSFTLMSNNTADAKTTMTVTVEPKELTAWQTVQSWFGKDFTETYNIQKDELDTGVKIDTNYQDTKVTVEETKSGKNFGIIELEESK

SEQ ID NO: 2117 - protein, 294 aa, Listeria monocytogenes
MANITAQMVKELREKTGAGMMDCKKALVETEGDMEKAIDYLREKGIAKAAKKSDRVASEGMTHVISNEKHAVVLEVNAETDFVAKNDNFQQLVDALAKQILAVRPDSLEDALKTEMPNGQTVQDYITEAITKIGENISLRRFEVKEKADNSAFGEYIHMNGRIGVLTLLEGTTDTTVAKDVAMHIAAINPKYISREDVSSEEVAHEKEVLTQQALNEGKPANIVEKMVEGRLKKYLSEISLEDQPFVKNPDITVGEYVKQSGGKVVSFVRFEVGEGIEKKEDNFVEEVMSQVKK

SEQ ID NO: 2118 - protein, 249 aa, Listeria monocytogenes
MPVISMKQLLEAGVHFGHQTRRWNPKMKKYIFTERNGIYIIDLQKTVKKVDEAFNFMREVASDNGTILFVGTKKQAQESVRDEAIRSGQYFVNHRWLGGTLTNFETIQKRIQHLKKIERMEADGTFEVLPKKEVVLLKKEQEKLERFLGGIKDMKGLPDALFIVDPRKERIAVAEARKLHIPIIGIVDTNCDPDEIDYVIPANDDAIRAVKLLTAKMADAIIEVNQGEELTEAEVAPVEEKATEETTEA

SEQ ID NO: 2119 - protein, 174 aa, Listeria monocytogenes
MAEKDGINTKDFLIGGLIGAIVGSAAALLFAPKSGKELREDLNTQVDTIKEKGNQWKDVAYEKGIEISGVAKGTKDKLVDSAGGFVDVVKDKSGKLADTVSKQSKAVKEVVSQNKEENQEAAKKAADAVKNEAKDAADDVEKAADKAKKEAKKAVDEGKDEAKKIASDVKKEVK

SEQ ID NO: 2120 - protein, 361 aa, Listeria monocytogenes
MVNTNLEELRTQVDQLNIDLLELISKRANLVQEIGKIKGTQGSLRFDPLREREMLNTILAANEGPFEDSTVQKLFKEIFKAGLELQEEDHSKALLVSRKNKKEDTIVTVKGLPIGNGEPVFVFGPCSVESYEQVAAVAESIKAKGLKLIRGGAFKPRTSPYDFQGLGLEGLKILKRVSDEYGLGVISEIVTPADIEVALDYVDVIQIGARNMQNFELLKAAGRVDKPILLKRGLSATIEEFIGAAEYIMSQGNGKIILCERGIRTYEKATRNTLDISAVPILKKETHLPVMVDVTHSTGRKDLLLPCAKAALAIEADGVMAEVHPDPAVALSDSAQQMDIPEFEEFWNAILASNLVPHKIK

SEQ ID NO: 2121 - protein, 335 aa, Listeria monocytogenes
MNVTIYDVAREANVSMATVSRVVNGNPNVKPVTRKKVLDVINQLGYRPNAVARGLASKRTTTVGVIIPDISNVFYAELARGIEDIATMYKYNIILSNSDENEDKELQVLNTLLGKQVDGIIYMGERISEQLQEEFDRSPAPVVLAGAVDMENKFASVNIDYKQATKEAVKRFVDNGHKQIAFVSGSLNEPVNREMKLAGYKEALEEAGISYQEDYIIEAKYNYNAGVKVWAELSALSKKPNAVVVADDELAIGILNAALDAGIKVPEDLEVMTSNNTKLTLMSRPQLSTIVQPLYDIGAVAMRLLTKLMTSEEVDEKTVILPHSEKLRGTTKEKK

SEQ ID NO: 2122 - protein, 419 aa, Listeria monocytogenes
MNIIDELEWRGAIYQQTDEEGLRKWVEEKQISLYCGIDPSGDSMHIGHLIPFMILRRFQNAGHRPIILVGGATGTIGDPSGKKEERKLQSMEQISKNVESLRVQLGKIFDFEGNSAASMVNNYDWTKDVSILDFLRDYGKEFNVNTMLSKDIVASRLEVGISFTEFAYQILQAMDFNHLYEFNDCRLQIGGSDQWGNITAGLDLIRKKQGENAKAFGLTIPLLTKADGTKFGKSEGGAIWLNPEKTTPYEFYQFWINTDDRDVVKYLKYFTFLTEAEIDELAKQVETEPHLRAAQKTLAAEMTKFVHSEEALEQALKISKALFSGDVKALTADEIEQGFKDVPTFVAEDSEANLVDWLVTLGIEPSKRQAREDVGNGAIYINGERQQDLEKIMDASDRIENKFTIVRRGKKKYFLVSYK

SEQ ID NO: 2123 - protein, 229 aa, Listeria monocytogenes
MKYIDYHDYMHKDAIIYAYLQNNFPYIRKRIKAWESFTLDREDILLVKSGAIFEEVNGKKKGIARCFFSKSLIFPTRDPIVLKAFETSEICFINAERAFGKLEEDQILSNFFLQIAEKNEEDMRRQAFLGTENSKNKIISTLNFLLENNKSNSKTPIFPIWLQINVLAKLANCSISTISSTVNELHAEGILDIKSSPWKLKGKEKKIEILENENQKMKLNERKHKSNVF

SEQ ID NO: 2124 - protein, 165 aa, Listeria monocytogenes
LSEWKILPMQKEHYSGVAAVHQEGIETGNATFQEKTLSLEAFDEKYLNTCRLVVLMNGEVIGWAALLPFSSMHAYRGVAELSIYIAKSARGKGVGKALMHEIIQTSEQNDFWTLQSLIFPENKASIALHHTYGFQTLCIHEKLGEMNGVFRDVALLERRSNRNGE

SEQ ID NO: 2125 - protein, 520 aa, Listeria monocytogenes
MTIAITIISSLLFLIVGLVVGSLIFKSSTEKKLAAARGTAELIVEDAKKEAETTKKEALLEAKEENHRLRTEIENELRGRRTETQKAENRLLQREENLDRKDTSLSKREATLERKEESISKRQQQIEEKESKLAEMIQAEQTELERISALSKEEAKSIILNQVEEELTHDTAIMVKESENRAKEESDKKAKNILSLAIQRCAADHVAETTVSVVTLPNDEMKGRIIGREGRNIRTLETLTGIDLIIDDTPEAVILSGFDPIRREIARIALEKLVQDGRIHPARIEEMVDKARKEVDEHIREVGEQATFEVGIHSIHPDLIKILGRLRYRTSYGQNVLNHSLEVSKLAGILAGELGEDVTLAKRAGLLHDIGKAIDHEIEGSHVEIGVELATKYKENDVVINSIASHHGDTEATSVIAVLVAAADALSAARPGARSETLENYIRRLEKLEEISESYDGVEKSYAIQAGREVRIIVEPDTIDDLSSYRLARDIRKRIEEELDYPGHIKVTVIRETRAVEYAK

SEQ ID NO: 2126 - protein, 348 aa, Listeria monocytogenes
VNDRQAALDQALKQIEKQFGKGSIMKLGEHSDQNISTISSGSLALDIALGVGGYPRGRIIEVYGPESSGKTTVALHAIAEVQAQGGTAAFIDAEHALDPAYAKNLGVNIDELLLSQPDTGEQALEIAEALVRSGAVDMLVIDSVAALVPRAEIEGEMGDAHVGLQARLMSQALRKLSGVINKSKTIAIFINQIREKVGVMFGNPEITPGGRALKFYSTVRLEVRRAEQLKQGTDVMGNKTKIKVVKNKVAPPFRIAEVDIMYGEGISREGELVDMAAEVDVINKSGSWYSYKEERIGQGRENAKQYLKEHTDIRDEISKRVREEYEIDGSSKEPLDEKEETLSLLDDE

SEQ ID NO: 2127 - protein, 327 aa, Listeria monocytogenes
MKKRQLGNAGLVTSELGFGCMGLNYHRGPAKDRNEMIEVVRTAMDAGITMFDTAEVYGPYTNEELVGEALVGKRNHVQIATKGGFKINGLNNEVDSRPESIKAAVEGSLKRLKTDYIDLYYIHRIDPSIPIEEVAGTIQNLKQEGKILHWGLSEASAKTIRRAHKVEPLAAVESEYSIWWREAEKEVFPVLEELGIGLVAYSPLGRGYLTGKLDINADFNANDNRGGLPRFQKEAMEANQVLLDFMKEIADEQNVTTAQLALAWILDQKPWIVPIPGTTRPSRIEENIASTEIHFDDGARQKIADALSQIEIVGDRYSAAENKRIGK

SEQ ID NO: 2128 - protein, 271 aa, Listeria monocytogenes
LLVEELKTKYLVKDICQILQVPLSTYYRWKKKDFSQSSLEKKIGQLCKAYQFTYGYRKIAALMKQEEQVGINKVQRIMQKYQWQCQVKVKKKNRPGSAYYQTENHLNRNFQASQPLEKLTTDITYLYFGDCRLYLSSIMDLYNGEIVAYSIGEKQDTELVLDTLNQLSLPEGSLLHSDQGSVYTSYEYYQCCKKKNVIRSMSRKGTPADNAPIECFHSSLKCETFYHKTAYKYAKSIVIQIVKDYIKYYNEKRIQQKLGYQSPINFRKQAA

SEQ ID NO: 2129 - protein, 111 aa, Listeria monocytogenes
VIYYICALYTFISALVSFGFSLDALLKSRKVNGDALINAKYAVSRSLSLLIVALGLFIFKSDAFLVALSLVMIGAQLFDGIIGIKISTFKTVGPLLTAVGNVIMLILFLTI

SEQ ID NO: 2130 - protein, 319 aa, Listeria monocytogenes
MSDYQVLLYYKYTTIDDPETFAKEHLAACKEMELKGRILVATEGINGTVSGTVEATNKYMDYMANDARFADMVFKIDAADAHAFKKMHVRPRAEIVSLSLEEDVNPLEVTGTYLEPSEFREALLDEDTVILDARNDYEFDIGHFRGAVRPDIQNFRELPGWIEDNREQLADKKIVTYCTGGIRCEKFSGWLKTAGFDDVSQLHGGIATYGKNEETKGELWDGQMYVFDERIAVPINQVNPTIVGKDYFDGTPCERYINCANPYCNKQILASVENEKKYLRSCSHDCRVHPANLYTKNLSKEEFTERLQAINESSPEMVQ

SEQ ID NO: 2131 - protein, 358 aa, Listeria monocytogenes
MQKNDDLLRERRKDEHVALGVKQNEQLAPSSLKDIQLIGTSIPRYNVKDIDLTTTIFGKNVPFPFYINAMTGGSRHTKKINAELAEIAREVAIPMAVGSQSAALKNSSLIDTYNIVREINPNGMILANVSPEVAIQDGLQAIEMLEANALQIHINPAQELVMQEGDRSFSHWLTRIEEYVKLSPVPIVVKEVGFGMTRETVKTLADIGVQTVDLAGKGGTNFAQIENDRRRDQAYDFLLDWGISTGQALIDMQHQDAPKIAYLASGGIRNPLDIIKALALGADSVGMAGQIIYSLKKEGVTKTIEKLELWKEQLRGLFVLANAKNIAELKTTPLIVSGELAKWGTLREINLVKLANRK

SEQ ID NO: 2132 - protein, 486 aa, Listeria monocytogenes
VKKETHGEIRRDLKTRHLSMIAIGGSIGTGLFLASGNAIHTAGPGGALVAYVAIGIMVYFLMTSLGEMATYMPVSGSFSTYASRFVDPAFGFALGWNYWFNWAITLAVDISTAAIIVQFWLPNTPAWLWSAIFLILIFGLNALSVKAYGESEYWFSIIKVATVIIFLIVGVLTIVGILGGEVIGFSNFTAGDAPFKGGFFAILGTFLIAGFSFQGTEMVGIAAGESATPETSVPKAIKQVFWRILLFYIFAIFIIGMIIPYTNPNLLSAEATDVAISPFTLVFEKAGLAFAASVMNAVILTSVLSAGNSGLYASTRMLWAMARDKKAPKFLGKVNRRGIPMAALIVTTIVGAMTFITTLTENGTVIYTWLLSASGLTGFIAWVGIAISHYRFRKAFIKQGHDLSELKYKAKFFPFGPILALVLCILVIVGQDYAAFLKPEFTNPAWWQKIGISYIGLPIFLVFWLSFKFTNKTKVIPLEDCKFDQK

SEQ ID NO: 2133 - protein, 153 aa, Listeria monocytogenes
MVGINTDTENISELLKTYWSIQRISAGYADQNAASLGLTIQQLAMINVIYSTPGISVADLTKRLIITGSSAAANVDGLISLGLVVKLNKTIPNDSMDLTLKLSKKGEDLSKRSTANAFMYKAMMKVFENLTENEIEELIRLNKKVETLLKKSK

SEQ ID NO: 2134 - protein, 122 aa, Listeria monocytogenes
MSFSIGEFSELVGIPSSTLRFYEKEGLITPDRDKNNLRTYSEEDANWLKFLLHLKGAGLSIEELKQYTIWRTAGDSTISERLNMLKEKKIVLEQEIENLQKDLDTVVRKIGIYEEKVAKLDV

SEQ ID NO: 2135 - protein, 489 aa, Listeria monocytogenes
LNMKAASTSVKRNGILIVMLMGAFVTILNQTLMNVALPSIMKDFGITASQGQWLSTGFMLVNGVMIPMTAFLIERFTTRQLYLFAMITFAIGTAIGGFATDYTMLIAGRMVQAIGAGIVMPLLTVVVLNLFPMERRGRAMGLIGLAMNFAPAIGPTLSGWIVQQYDWRNLFFIIIPFAILDIVVAIFLLKNVGKRTFPKLDVLGVIMSTVGFGSLLLGFSNAGDHDWLTWKVAGFIILGLVVLGIFIRYQTSNKAPLLNFRVFKYPTFALTTAISFFVVMGLFGGMLLLPIFLQTVRGFSPLESGLVLLPGALVTAILSPVTGVMFDRFGAKYLSLVGLIIMAGSTFMFTNLDESTTLTFIIIVQTIRSAGMAMVMMPLQTAALNSLPLKLASHGSAMFNTMRQVAGSIGTAALITVMSKSAASFATKLGPADVIGKTKTDIANHVLIHGIETAFLVAGILSVVACVLALFIQKNRSAMDPIVTKTEKA

SEQ ID NO: 2136 - protein, 146 aa, Listeria monocytogenes
MDEKLVKEVIFSFREVQRKTHHVLAEEAANREITTTQLLAIRELQRESELTLGELAERMKLGKSTVSGIVDRLVKAGFLKRTRNENNRRALSLELTEKGATKAAETYHVFFNRLEPILEIGEDRLKEMLKMHQEIITILEREGARD

SEQ ID NO: 2137 - protein, 289 aa, Listeria monocytogenes
MKVLVNNHLVEREDATVDIEDRGYQFGDGVYEVVRLYNGKFFTYNEHIDRLYASAAKIDLVIPYSKEELRELLEKLVAENNINTGNVYLQVTRGVQNPRNHVIPDDFPLEGVLTAAAREVPRNERQFVEGGTAITEEDVRWLRCDIKSLNLLGNILAKNKAHQQNALEAILHRGEQVTECSASNVSIIKDGVLWTHAADNLILNGITRQVIIDVAKKNGIPVKEADFTLTDLREADEVFISSTTIEITPITHIDGVQVADGKRGPITAQLHQYFVEEITRACGELVFAK

SEQ ID NO: 2138 - protein, 78 aa, Listeria monocytogenes
MQEQDIRYYVLPTIIIFILGIAAMNASSFPFISFLTTTLVAIAIGITIGGAHQLIRLVIKTYQQTKERRVSQKKWQTL

SEQ ID NO: 2139 - protein, 607 aa, Listeria monocytogenes
MASPLKRLLIGRPLKTSEAGDQKLGKLKALAVLSSDALSSIAYGTEQILLVLVTVSAAAMWYSLPIALCVLVLLFALNLSYKQIIYSYPHGGGAYIVSRENLGNNAGLIAGGSLLVDYMLTVAVSVSSGTDAIVSAVPSLYPFAVPIAVVLVIGVTIINLRGITESASLLAIPVYLFVFSIIALIFTGLFKVLTGMDASHETAAVGTHVQGVTIFLLLRAFASGSASLTGIEAISNAVPLFKEPRPKNAAKTLTLMAGLLGFFFVGITVLAFVYGTVPELKVTVLSQIAENVFGRNFMFYFIQATTALILVLAANTGFSAFPMLAFNLAKDKFMPRMYLARGDRLGYSNGIITLAVGSILLIILFKGKTELLIPLYSVGVFIPFTLSQTGMIVKWWKQRPKGWKKSLSANLLGASISFTVLLVLFLTRIESVWPVFVFMPIMIYVFHRTRHHYRKVGPQLRIDETMDLPDFKGNAVIICVSDTTKVVEGALQYAKSIGDTVIAVHISIDKKQEKEFVERWNRVHPEVRMANLFSPYRSISDPLMKFIDTAKQKADQDNYSLTVLIPQFIPRKGWQNVLHNQTSLLIRTRLLMKRDVVVSTYPYHLKE

SEQ ID NO: 2140 - protein, 179 aa, Listeria monocytogenes
MRCLKSINTERRDEFNRLFLKGILVWLAAVCICFLTQHLIYPDQLTNDYQLASFLGIILIYPIHKLLHILGCFKYREGTVIQWRIHFFFLPCIKLNIKRIIPKWHYIFSLILPFVIITTILVALMLFTPIGHSGMFLLLLSVHFGMSFSDFTHIKKLWKMPKNCFIESAERGFSVLISD

SEQ ID NO: 2141 - protein, 108 aa, Listeria monocytogenes
MKKLKQLTNQLFTSTIFLVTMLFIIPPTFAIADGSKVSFYEYIYGAPLRWLTVISTTEKKGAFLEMFFSENEGINIQWLNLIINFLLVFLVITIIFSLAKKFYNKKNA

SEQ ID NO: 2142 - protein, 293 aa, Listeria monocytogenes
MKKKLILGLVMMMALFSLAACGGGGDVVKTDSGDVTKDELYDAMKDKYGSEFVQQLTFEKILGDKYKVSDEDVDKKFNEYKSQYGDQFSAVLTQSGLTEKSFKSQLKYNLLVQKATEANTDTSDKTLKKYYETWQPDITVSHILVADENKAKEVEQKLKDGEKFADLAKEYSTDTATKDNGGQLAPFGPGKMDPAFEKAAYALKNKGDISAPVKTQYGYHIIQMDKPATKTTFEKDKKAVKASYLESQLTTENMQKTLKKEYKDANVKVEDKDLKDAFKDFDGSSSSDSDSSK

SEQ ID NO: 2143 - protein, 313 aa, Listeria monocytogenes
MEKRLLDFEVGETVDLFLLIKSSVKGTASNGKPFLSLVLQDKSGELEAKLWDVKESDEANYGVQQIVHLMGDIQNYRGRKQLKIRQIRQATALDGVSASEFMETAPINKEEMADEITQYIFEMKNANLQRITRALLKKYQDDFYDYPAAMRHHHEFVSGLSFHVVSMLRLAKSVADLYPSVNRDLLYAGVILHDLGKVIELSGPVSTTYTLEGNLIGHISIVVEEVSKIADELSIDGEEVVVLKHVLLSHHGKGEWGSPKPPLVREAEILHQIDLMDASLNMMDKVLKHTKPGEFSERVFGLDNRSFYNPTFE

SEQ ID NO: 2144 - protein, 351 aa, Listeria monocytogenes
MSWMIIFICFGASVLLTPLIRKIALYFDITDKPDQRRINIKPIPSLGGLAIFISFTIGMFLLPIENEFLWPLLIAAFVMVLTGLLDDIMEFKARYKLIGQITAAFIIVFWGNISIDFINLPFGGEIHFGMLSIPLTIIWIVAITNAINLIDGLDGLAAGVSTIALLTILGMAFIMGDALVIMIASVLIAGTLGFLPYNFNPAKIFMGDTGALFLGFIISVLSVMGFKNVTFISLIVPILILGVPISDTLFAIIRRMVTKQPIAMADKSHLHHCLLRLGFTHRQTVILIYAIAALFSLFAFIFTMSTLWGSMILIGVLLVLIEVLIETLGLVGSSYRPLLNLFKLTKEEKID

SEQ ID NO: 2145 - protein, 240 aa, Listeria monocytogenes
MIDKQSGIPIYIQIQSEIKKKMEDGVWKVGTSIPAERQLAEMFHVSRMTVRQAIQGLVDDNILQRRVGAGTFIAEKKLTERLEAVTSFTNLMLQEGKVPSTRIVSYGIRPASTQEQEALQLPENSNVMKIERIRYGDRVPILYEVAAIPEKIASLLTKEDIMDSLYKAIELKLGQPIGEAEQIMEASLVSEKIAPYLDVKLGSPVMKLRQITTLEDGRPFEFTRSQYVGSRFQFVARIKQ

SEQ ID NO: 2146 - protein, 234 aa, Listeria monocytogenes
MQLITTENKLAGSKKALEIIEKGITSGEVNTLGLATGSTPETLYAELVKSDVDTKNVTTTNLDEYVGLAASDPNSYHYYMNDLLFSKKAFKESFLPNGEATDAEAECARYEEILSEHPIDIQVLGIGTNGHIGFNEPGTSFDSITHKVVLTDSTREANKRFFEREEDVPTHAYSMGIKSIMNAKKIILLAFGENKAQAIKETIKGPVDVNCPASVLQNHPDVTVILDNEAASLL

SEQ ID NO: 2147 - protein, 114 aa, Listeria monocytogenes
MNKLIDEITKSQLNPDVPNFRPGDTVRVHAKVVEGTRERIQLFEGVVIKRRGAGISETFTVRKISNSVGVERTFPVHTPRIAKLEVIRRGKVRRAKLYYLRNLRGKAARIKEIR

SEQ ID NO: 2148 - protein, 296 aa, Listeria monocytogenes
LKKNNWLQNAVIAMLVLIVGLCINMGSGTKVQAESIQRPTPINQVFPDPGLANAVKQNLGKQSVTDLVSQKELSGVQNFNGDNSNIQSLAGMQFFTNLKELHLSHNQISDLSPLKDLTKLEELSVNRNRLKNLNGIPSACLSRLFLDNNELRDTDSLIHLKNLEILSIRNNKLKSIVMLGFLSKLEVLDLHGNEITNTGGLTRLKKVNWIDLTGQKCVNEPVKYQPELYITNTVKDPDGRWISPYYISNGGSYVDGCVLWELPVYTDEVSYKFSEYINVGETEAIFDGTVTQPIKN

SEQ ID NO: 2149 - protein, 200 aa, Listeria monocytogenes
MFKTIVDTLIAQRRDRKIKESERRQENYRAKRENLTEVYRSLILIVNLFPNESPTDIIKNIKYGPYYSLENYNGIFRTLDYKIEDYEKRKSFSNLDYEEKNDIDIEISNIEYAKDKLARNRKSYQKAVKCFNQFKDSDKAIFDLYAGTHVQNCLVNFEITINNVFISGMSVGIPDSPYENSIKIASRKLISAMKKDIGIT

SEQ ID NO: 2150 - protein, 377 aa, Listeria monocytogenes
MANKVITNATIYTGKGVLENAFVRFDKQILEVGSMADFQADKAEEVIDAKGQKLVPGFIDVHSHGGYSFDAMDADPEALRKQVNGMLNEGITTYFPTTMTQSHENIEKALKVINEVAQTEPVIGGIHLEGPFVSKVFKGAQPEEYIQAPDLELFKKWFDISGGLIKLVTYAPEHDTSADFENLCFELGVVPSIGHSNDVREHLKTSKATHATHLYNACHRMTHREPGVPGHVLLERGINAELIVDGIHVHPDMVKLAYQMKGPEHLCIITDSMRAKGMPEGKSELGGQTVIVKDKQARLEDGTLAGSVLTYDDGFRNMIKFTGCSVEEAVLMSSGNQAREFNLTQKGAIEAGKDADFNLLDEDLHITATYSFGKKHS

SEQ ID NO: 2151 - protein, 281 aa, Listeria monocytogenes
MANLFEKMKQWNKEVSEKIEKREEKRRNSVSYYMDKTKQEMKDAERMVEKQRELKSLFYKEYKEMEVYVEKRRHQAEIAKEAGETKLADFALEEVAQYEEQLEATKAHYDQASEQLEKLELRMHEMRLKWKNLKTQHLAEMAEKNATETSEKMDKVIHDMSWGSVSDYHEAQKQRDLAEEAEKKADMSKELSQSFDDLMDELEKKTKKSKEIIKDKAQNFTTMVDEIIEREKQNFKKPEKASMEDQLNELEKEAAKEKPKEEKEVLIPELEKKEEENETDK

SEQ ID NO: 2152 - protein, 132 aa, Listeria monocytogenes
MSKTTQMNSEIFQINLEKTLKEIMVAKGLQSDEIRFVIVPVEEKGKMLDGSDEMMKRLVLTKENIGNKQLVLKDVVDVLGGLFPKAPIWINVSFLEMNGEKAIFKLETSLRFRKPTLLRNAETGHAPFKAIT

SEQ ID NO: 2153 - protein, 428 aa, Listeria monocytogenes
MEKITFEQVKEAVFHEKMANGLQVYLLPKQGFSKTYAVFTTNYGAIDNNFVPIGETEFTKVPDGIAHFLEHKMFEKEDGDVFFKFGEKGAFTNAFTSFTKTAYLFSSTSRVEENLETLIDFVQEPYFTEETVEKEKGIIGQEIRMYDDDPDFRAYFGVIENMYHNHPVKIDIAGTVESIAEINKDLLYLCYNTFYHPSNMVLFVVGNLEPEQMMDQIRANQAKKEFAEAAPIKRHFPEEPKTVAVKERKIHFPVQIAKNLVGIKEDIGSLEGQAAIKQEIIGDVALEMLFGTTSATYLKLYNEGIIDDTFGYDYTLQDSFSFVLVGGDAKDPDKQTAKIKDAIKEAAKNGLNESDLALVKRKRIGQFLRSLNSPEFIANQFSQYVMKSASLFDILPLMEKVTLEEVNAFVKNLDKEERTTSFQLLPEE

SEQ ID NO: 2154 - protein, 355 aa, Listeria monocytogenes
MKMDSETLLLDVKKLGERVSTLKDSIATEEATKTSLIMPFFQLLGYDVFNPLEFSPEYVADVGIKKGEKVDYAILNNNNPIILIEAKSIKSDLKNHDSQLFRYFGTTTAKFGILTNGNEYRFYTDLEEPNKMDKTPFFSFVLTEIKDVQISEIFKFQKENFDVENISKAASDLKYLNFVKEFLTKEVNDPSEEFVKFILGEIYDGIKTKVIIDKFTPVVKRGFRQFIADQVNSKLNAALNTSVSVEDLEVPQVEANAEEEEDIITTEAEIEAFTTTKLLLKDTIDTSRIFYRDNKSYFNIIIDNSIRKWVLRLYINNARTYFVINDEEKTTIEIVDVIDIFNHADKIIPVVERYL

SEQ ID NO: 2155 - protein, 191 aa, Listeria monocytogenes
MNNYEKRTLKKKTAIIQAALSLFGKQGFSDVSIKDIATLADVSQVSIYNYFGSKEALVGECARIIMQDTITLAEEILASEGTFTQKLERALKLCNAEINLSLSKFISQEASKDAQFITLLVNNINALKNEIYMKYIAIGKQEKIIDSRLSDQSIQLFIEAINGLGFTVPEEELEEKQAEIVQLFLYGLIGK

SEQ ID NO: 2156 - protein, 222 aa, Listeria monocytogenes
MMKITKRKKITLIILGGIIGLSFILYKPLINYLSEQAANPRGIIGEITTKIWSSYFEDLSKWTISNTELSNVNHVLDIGYGGGSNVKNLAELNKNWTIYGVDISEESYKTATNLNKKAINNGTVKLSIQDVALMNYQADFFDLVYAIQTHMYWDNPQKGFEEIYRVMSQDGVLILSSEKDKIDYHMDEYKTTASLTALLKEIGFREVVEKEKGNWILYTVRK

SEQ ID NO: 2157 - protein, 243 aa, Listeria monocytogenes
LDKEIKYAFVTGASGEIGQAICMSLARAGWNLYLHYYQNKETVEKLLPLLQAEEVDVILIQADFDDLASLTEIEKQVFQLDAFIHAAGHAHYSLFQDTTDTNIAELWNVHMFMPMRLIRTFMPKLMKSSQGRIIFISSIWGEVGASMEVAYSTVKGAQIAFCRALSQEVGLSGITVNAVTPGVVETKMMDQFSEEEKDNLRQEIPLNRFAQPEEIAETVAFLTSKKASYITGEVLRLNGGWLM

SEQ ID NO: 2158 - protein, 309 aa, Listeria monocytogenes
LTELGDKLKQARREKGLSLDDLQQITKIQKRYLVAIEEGNYAVMPGKFYARAFIKQYAEAVGLDSATLFDEFESEVPETPQQEVVNNEPTRVQSKRNPMPAQSVGNQANTRNRFFDILPKILIALFIVFILFIVWFFLLNKQDNSTEKVKTDTNNPTVKVEDSTKSKDTSKDTEKKDTTTNEDKSTETKDKKEDTAKEVEVTKGETSGNATTYTVKNTDKMTLSLSATGDSWIGVSDANGSTIQNETLSTQNPSAEIDLGDNKTVSIVIGNSPVTTVKINGKQLELAPDLVKQVLTINLEASDSSSDAE

SEQ ID NO: 2159 - protein, 192 aa, Listeria monocytogenes
MNLPNKLTVIRIFMIPIFVILCVVPFDWGSVTWLDSTIPVTSLVATIIFIVAALTDWFDGHLARKYNLITNFGKFADPMADKLLVAAAFIILVEMHIAPSWVVILIISRELAVTGLRLLLVEGGEVLAAGQLGKIKTFTQMIAIPLMLLNNFPFAWTGIRVDLVFLYVCAFFAVWSGIDYFYKNRGVFKGSM

SEQ ID NO: 2160 - protein, 492 aa, Listeria monocytogenes
VSRIDIGEIQAFLYQLRATNEPGRKTIQSIKAAVTKYVGDNSLKGKAVDASKNYYQMTYFPLCDAIIEAMDESEERLGQYIQDFHAEVDSSPDAKIDADGLYELGKMIDRIESKKEALAQRMNSGTEGQMQNYRSQLAIAYKQENILEKYLSFEQSHANFFDHLIDLVQAVQQTIRELQSNIQFNSQTGTYDLSKLNSATVSRMQQALNKSRGIKEDIIKELRDYTVLAVVYLDSNGKEQVMWLLERDGVGVENAELKAYLTENGKYLNPEDYTIITNEELNKKINQSWRDGVYYLNGNKYDGLTGGVLSTSAYVEAGKGYIDKSGFADVVLGLGLSTAAIRGSLVYKKVNGPYKQNIKNRYPNEVQQGKIFDYTLENGQVKIRDGIKEVDFIIDLQGNLKVGRGHAHLSNGGDVQAAGKLKVDSNGNVRRITNESGHYTPTLGQAKNYQQIFENTGINTKNAWLETYQLDVTKSGYVDLAKLKRIDSVKLK

SEQ ID NO: 2161 - protein, 414 aa, Listeria monocytogenes
MASAEIIAVGTELLLGQIVNSNAAFISQELAADGIYVYHHTVVGDNPTRLKEVIEIAEKRSDILIFTGGLGPTEDDITKQILADHLQKQLVEDEYHMNKINEYFASRNRTMTENNKLQAVIIKDSVVLNNDYGFAAGMYLKENNHTYVLLPGPPSEMKPMFTKYANPLLLSENGNQNILESKIMRFFGIGESQLAADLNDLIVNQVNPTIATYAGDNEVVVRITATAKTKEEASSLVKDTEEEILRRDGTFLYGYGEVSLPELVTAMLLEKELTISAAESFTAGLFQAEIARFPGISKIFKGGMVTYSEETKQSILQVSPQVIKEKGVVSAECAKEMAENVSRLCKTDIGISFTGVAGPDSLEGHPAGTIWIGLSVKGHETEAFQFVYGRDRNHNRRRAVKQGFQLIKQFLDAN

SEQ ID NO: 2162 - protein, 299 aa, Listeria monocytogenes
MKKVIILIIALAVIITGFWIIFLQFEPTKKEAKEPTVTANKTTTKEQNSVSEIAIPTLFVHGYSGTANSFGGMINRLAEDGDVTKSLVMNVAADGTVSSKGDYDKFSHNPTIQVIFEDNKSSAANQTQWIQNVMKELKNNYHIEKVYAVGHSMGGVSLTSYIEKVGNDKTYPVLEKLVLIGAPLNGLVIGDDGVTAYDLTDSGPKKSSDRYSEFMKNKQKIPTNLHVLNIAGDTLNGTKSDGSVSVASALSGKFIFEGQAASYEEKTFTGKNAAHSKLHENTNVDAEVADFLWGIEKVD

SEQ ID NO: 2163 - protein, 273 aa, Listeria monocytogenes
MLKRVFFSIILPLGCLVGAIFILLTINTTYPKAANDSIPTIFIHGYRGTDRSLHGMIRRFDQKYDWGTESLTVNVSPDGEISTTGTYNKKEKNPLINIVFEDNRATLPQQSMWTKKVMSYLQQNYAIKKFNAVGHSMGGGAWVSYLASYEKNKSYPQVNKIVFLAVPFYPEEYVNGDQQVDIKNANNVHAKFAEKMAKVLPNNTEIMIIGGNLEDGSNSDGEVKLDSVLYGEKLFAHQKVTTHVIKGPQATHSSMHESTVVDKYVGQFLWGEK

SEQ ID NO: 2164 - protein, 266 aa, Listeria monocytogenes
MGEAIVITSGKGGVGKTTSTANLGTALALQGKKVCLIDMDIGLRNLDVVLGLENRIIYDLVDVVEGRCKIHQAMIKDKRFDDLLFLLPAAQTTDKNAVSGEQMVDLINQLRPDYDFILIDCPAGIETGYKNAVAGADKAIVVTTPEISAVRDADRIIGLLEKEDIEPPKLIINRIRTQMMMNGDVMDIDEITTHLSIELLGIIIDDDEVIRSSNSGDPVAMLPNNRASQGYRNIARRILGESIPLMSIETKKAGFFARLKQLFSGK

SEQ ID NO: 2165 - protein, 453 aa, Listeria monocytogenes
MKKLIVSAAPIEKRVVAMEDDLLIDIEIVRPSEKVQVGDIYYGFIQKIDRKVEAAFVDLGNNNKGFIHLKDIPESYDKTQGAKIPVQIVREGSVTKLPLLTGILEFSGDLLIYLYGKEYISVSKRIEDKITLKKIMETMVEENEAIIIRSNAEFATKEQLQQALVQARDKYQTLVKEASKRKKPGLLLSAASGILNSTKQFIQRYAPSEVITDDFEFAKMLEMIYPDKQIILKKSADLFADLGIKAQMDRLARPVVHLSNGSSLFIEKTEAMWVVDVNSGKFKGTTVKEKTVESVNLKAVPEILRQIRLRNMSGMILVDFIGGMSEAGYTELYAALESQTREEYITTQVAALSQSGLLQLTRRKKQQSFLETTTMPCPVCYATGHVASKETLAFELERELSGIMQNEPNSIQIITTEDVLETFLDLNTLSNAPIDWEVADERVPFYQIARVEN

SEQ ID NO: 2166 - protein, 261 aa, Listeria monocytogenes
MIRKLTVSDNEEVMALLKPEATQNLFIIGDIENFGYESDVQDLWGEFDSVGKLHALLLRFDTFFLPYSKDANFNAEAFSEIIATHDKYEVSGMSRVTKELEAFLPELAEKRQDTYFCECEHVNRIPVNQDVIVRTAVAEDVGPIIKMRKHIKEFGSRDENEELIIRQIEKGVKRIYYIEQDQEVVAVAETSAENSFSAMITGVATSDEYRQRGFASTLLKKLCCDVLAEGKKPCLFYDNPVAGEIYHRLGFEHTGDFVMYK

SEQ ID NO: 2167 - protein, 256 aa, Listeria monocytogenes
VKPRGICFFDMDGTLLNSESKVLDTSLQALDKLRENNVIPVIATGRTLIEISHQMKITGIESAVMMNGQMAIFEGEKVYEDVIDAGLLEQLTEEAKSQNVEVCYYNDKRIGATASTPVVKAHYDFLGEPMPEVRPNMYKEETINMALLLLETGDDYFPERFPELQFVRNTPFSNDVLRKGGSKAVGISKLLEVMGYQDVPTYAFGDGMNDLEMFGAVDYAIAMENAVPLLKEKATFVTKDNNSDGIMLGLKQFDLI

SEQ ID NO: 2168 - protein, 553 aa, Listeria monocytogenes
MSIINSNFRSLGSYIMENIYKIPNYQREYSWEETELEDLWMDLSQIINGETESHFFGQIVIHVDKKEKAKLIIDGQQRTSTAVIFLAAMRELFTEMYNAGWDDAQFDAQDITTKFIGRYTQTRDERKLILGENDKSYFSNRIQSVSSEQLGLQKATKSQKRINFAYNYFYKKLEEEINSSDFLEDKYGLLKTFFSTFTEKCSVMFVETDDFNEAFIIFETLNARGKDLETADLLKNHLFKIANKKVGEVKKNWKQMLEFIGTVDTTKYIRHFWNSQNVFIREKDLYKEIRKKITTQFEAIIFIDDLVRLSEVYGGMKNPAEDNFFETDSQQVLNDLKRLGAKSFYPIILAMVKKDYGPNEIYEVLSAIEVLVVRNFVISGLVANKYETEFSKIAFKIYQEEVESVTEIINLIRTNIIADDVFLNNFSSFKTTNKLRLRYILKKINDSYSKEIAVLNDNNKIHLEHIMPIKADGWDIIKEEHEEYLWKIGNLTLLGSEYNKKSTNKIFNDKKDIYEYSEVQLTRKLLDYDEWNIDVIKERQVELAELAVNIWKV

SEQ ID NO: 2169 - protein, 358 aa, Listeria monocytogenes
MANNLKQTLRSGEMYMVRKFFGYIGTRRFNIYEALVYRNRYSLKNKEKLIFYDGTSKIKQKIAPKSGSKNGRSPHFAYYPNSSHDGVGKEMTVTHKAYQEAISTLKIFCIETLDGEVIILEVEEAKLEYYINDEGQYYLVDILIVLKSTYPFYYFYKWEGILAIEIWVSHKTEQKKIEALNRKGIPTIECKISKKLLLNEDIQSDKEYLTNVQKVINRYSDIKFHLYGRFISDAKIDETSVWGEKYLEFKNYHNEKKRMELHFRKLEKQKLELEKKNKELISENYNLDLEIKNKHTVIEKLSKNKMEVEANKELLKICKIENGNLIKKVSALNFELVKMKEYKDHPIKTFWKDKIRFK

SEQ ID NO: 2170 - protein, 470 aa, Listeria monocytogenes
MTEINWQKEVEARKDDFLEDLKGLLRIPSVRDDSKKTEDAPFGPDVKRALDYMMELGKKDGFTAKEVGNVAGHLEYGQGEELVGVLGHVDVVPVGDGWTNGPFEPTLRDGKLYARGVADDKGPTIAGYYALKIIKELGLPLSRRVRIIIGSDEESGMSCVERYFETEEQPTLGFVPDAEFPIIHAEKGISELDVSFKDGEAGGEAAFRLLSVESGERYNMVPDHATAILEDVKDFDKVASAFKTFLANHPVEGTLEENGKSVKINIVGKSAHAMEPNNGVNAGLHLVAFLGKFKLTGAANDFVTFGRDYLFGDSRAVKLGISYEDAESGELTMNVGVIRYDVAEGGKYGLNFRYPVTASMDKLKNKMQTVVYEYNAQYTHYEDSKPLFVPKDHPLIQVLQEVYTKQTGEEATLLAIGGGTYARHMETGVAFGALFPGREDTMHQKDEFSYFDDLLKATAIYAEALYKLAK

SEQ ID NO: 2171 - protein, 321 aa, Listeria monocytogenes
MATLADVAKRANVSKMTVSRVINHPDQVSDELKMLVYSAMEALEYVPNYAARALVQNRTQVIKFLILEEIDTVEPYYMNLLTGISRELDKYYYSLQLVTQRSRNIGAYDGLIVTGIRDKDYDLGLLDIDKPVIFYGENKRGYDSIDVDNKKGTALATEHMVEIGFSRIVFLGINLLDEQFMKSRLEGYEEVVKEHGLEPESYFIANSSSIAEEKAFELLRYNSEKIAIVCASDRIAIGVVRAAAAFGRRFGENIAVTGFDGVFLDRISSPKITTVRSPVVEMGEELAKMLLAKINDHGKPQGNLLFTPELLIRASTTGKEE

SEQ ID NO: 2172 - protein, 211 aa, Listeria monocytogenes
MENTLSFKKQGYWLFSSAIIIGVLFLLLPHIISNIGVLEFIGAFFNALCMGVIAFIILKAEFLDWFKHFSFKWIIIGAPALIIISSIFNIAWAYFAGSTTENGINSVLTWTYVFTSIPFMLLGEELLSISLLYAAWKKWNWKFWQASLLCSLLFATWHLTSYDFNFLQCIITLAPARLILNYLFKKTNSVWVTFIVHFIFDFIAFLPILLK

SEQ ID NO: 2173 - protein, 318 aa, Listeria monocytogenes
MTASVFVAGKLLPETMEALSKWDVKAFSGEENITEAELINNVTEVDAIICPLSSPISAKVLESAKNLKIVANIGAGFDNIDVKKAQELGIAVTNTPDVSTEATAELTLGLILDVARRISEGDRLCRETPEQFKGWAPTFFLGTELSGKTLGIIGLGRIGQAVAKRAAAFGMNIIYSGHQPKEAAKEWNAEFVSQKELLKRSDVVTIHAAYSPSLKHLLNETTLKTMKSSAFLINAARGPVVEEAALIKALETGVIAGAALDVFEFEPKIGEDFAKLDNVVLTPHIGNATVETRAAMGKIAIANVEAVLAGKAPLHSVY

SEQ ID NO: 2174 - protein, 118 aa, Listeria monocytogenes
VLVNFLLVGFGAALGAMLRYGISVLVKSKWKTNFPSATFFINITGSFLLGFLVSSALGPVWQLFLGTGFMGGYTTFSTFKVESMELKWKTNYRVLFSYLGFTYVFGLIAAFLGMMLGV

SEQ ID NO: 2175 - protein, 94 aa, Listeria monocytogenes
LLKPLGDRVVIEVLEAEEKTASGIVLPDSAKEKPQSGKIVAVGSGRVLDNGTKEPLEVAEGDTVIFAKYSGTEVTYEGTDYLILRESDILAITK

SEQ ID NO: 2176 - protein, 119 aa, Listeria monocytogenes
MKKKYRIKKNDDFQKVFRRGKSFANRQFVVYTLKQEGSNHFRIGLSVSKKIGNAVCRNRIKRYIRQSFHELESQINPENEYIIIARKPAANMDFHEVKKSLIHVLKVGRVLKQKPNNSK

SEQ ID NO: 2177 - protein, 156 aa, Listeria monocytogenes
MIFQRLLKTRDTEFYRVIQNGNIDDVFGYLLIHDKREPAEIDDFKVFAKSNINKEAFSVNIKKNHIYTMFFHFTDLEEEQEIPKFTKVIRFIEGLLSFQPETSHYVDNYLIKEKLIFEYPAEFEKIGEFAKYLVKLSGRKITIPDTTREKYIYLTQ

SEQ ID NO: 2178 - protein, 107 aa, Listeria monocytogenes
MTDAHTVCPKFESAFQLLGKRWTGLIINVLLTGPKRFKQVAAEIPQMSDRVLAERLKELEEMDICLRQVYPETPVRIEYELTEKGKALQEVMLEVQCWADKWVEVPN

SEQ ID NO: 2179 - protein, 212 aa, Listeria monocytogenes
MKKITAPRIPDGDLTVYPNDTYFIEDIGEVSEQIFRKTTLTGEIFEHFHLETIIFDGCVFDSVSLVSANLTDVVFKNCDLSNLDLMGAIIHRVRFENCKLIGMNFSDATLRNCVFVDCYADYVAFRYANLKWVAFEAGAYTNSDFSGAQLVDTYLERLDLNKAQFLNCALNGIDLSSCIFESITAMPQDLKGMSIDFSHAPALMPLFGIRVK

SEQ ID NO: 2180 - protein, 100 aa, Listeria monocytogenes
MNIEVTDQANKWFHDEFDVANGNGIRLFAKYGGSNSSLHPGFSIGLTAEKPQEAAVAEKKEDLIFFIEDHDYWYFKDHDWKIDYEPKTEEVLFSFKEKVK

SEQ ID NO: 2181 - protein, 156 aa, Listeria monocytogenes
MKTINSVDTKEFLNHQVANLNVFTVKIHQIHWYMRGHNFFTLHEKMDDLYSEFGEQMDEVAERLLAIGGSPFSTLKEFLENASVEEAPYTKPKTMDQLMEDLVGTLELLRDEYQQGIELTDKEGDNVTNDMLIAFKASIDKHIWMFKAFLGKAPLE

SEQ ID NO: 2182 - protein, 126 aa, Listeria monocytogenes
MDLVKNGKVLELVHPNGNWTLIKEEGFSPVQITVAAVAACSGYVYQTLLEKKRIDINDLSIHTDYEQDQESAVHVLTKINVTFTVDLVDKSNQAKAEKTVHLVKDACPVAKSLDPSIEINEIVVFK

SEQ ID NO: 2183 - protein, 314 aa, Listeria monocytogenes
MKTIYLHHPITTDEWTDINKVMALGFFDGVHLGHQAVIKQAKQIAGQKGLQTAVLTFDPHPSVVLSNIRKQVKYLTPLEDKAEKMAKLGVDIMYVVRFTTQFSELSPQAFVDNYLVALHVEHVVAGFDYSYGKKGEGKMTDLAKYADGRFEVTIVDKQTAASDKISSTNIRRAITEGELEEANQLLGYPYTTKGTVIHGDKRGRTIGFPTANIRVNEDYLIPKLGVYAVKFRVNGETHLGMASIGYNITFKDDQALSIEVYILDFHREIYGEEAEIKWYQFFRPELKFNGVEGLIAQLEKDEQDTRAFFAKLED

SEQ ID NO: 2184 - protein, 350 aa, Listeria monocytogenes
VITNQRDIDKYYDMLVEKNSNYEGVFFVGVKTTGILCRPTCPAKKPLKENCEFFSTAKEALLASYRPCKRCEPLSNPTKLSPAVKLLVDAIEKNPEKKWTDKDFDDLSISANTARRQFKKQFGMTFIEYARSRRLGLAFKHIRGGNSIINAQLDSGYESGNGFRDAFSKTMGEVPHKSKDITILYSAWLETKLGSMLAISDDDSLLLLEFVDRKGLETEIKKLRMRLNAAITPEKTIIIQQIEAELAQYFNGELIDFKTPIRYIGSDFQENVWEELRRIPIGETISYKGLAEKLGRSTASRAVARANGANQLSLIVPCHRVINTNGALGGYGGGLARKEWLIKHEKMVPK

SEQ ID NO: 2185 - protein, 353 aa, Listeria monocytogenes
MSKLTKIQETLGKEKIEAVLVTSEFNRRYVSGFTGTSGVALILPEKAYFVTDFRYTEQAAKQAEGYEIVQHTGPIFDTVEDLLIKNDTKTLHFEADYVTVSEFKQMERVFNRQLIPLTGFFEEMRKVKTASELKAIRTACDIADAAFAHIIQFIKPGMAEIEVSNELEFFMRRAGATSSSFDTIVASGIRSALPHGVASDKKIEVGDFVTMDYGCYYDGYCSDMTRTIAVGEPAEKLKEIYQITLDAQLKVIDSLKPGMTGIEADAIARDYISSFGYGDAFGHSLGHGIGLEIHEGPNLSFKSPQKLEVGHVVTDEPGIYLPGIGGVRIEDDLLITETGNEILIHSPKELIIL

SEQ ID NO: 2186 - protein, 88 aa, Listeria monocytogenes
MARIEYGEEIQKSLLVLYSRGSTIDSICKEYGIPRYEFHKWMKLHDADKLETKEVKTLLQIRELKQQKNKLEEEILFLNEAINLLESP

SEQ ID NO: 2187 - protein, 133 aa, Listeria monocytogenes
MEVFVDGASAGNPGPSGAGIVLKADGIYEQFAIPLAVMTNHEAEFIAIKLGLEEALKKQATLIRLYSDSKVAIEAIHKRHAKNPLFKPHLDAILEMADSLELFFAEWRNVSQNKQADQLARQAIKKQKQPGVK

SEQ ID NO: 2188 - protein, 121 aa, Listeria monocytogenes
MELLNRTEKLLLQNEKNWELYLSNREEAKPFDFYKDMKPFVDEAKNSADAFLELAIPWVNKERPPYLGELQLRQACDNVQMTAVSAFNGKSFYKHFLDHYQSTKYTLTRVRDFLKRKEELM

SEQ ID NO: 2189 - protein, 150 aa, Listeria monocytogenes
MEGRIGRIKAQLHDASYKLTPQREATVRVLLENEKDHLSAEEVFLRVKDIAPDTGLATVYRTLELLTELRVVDKINFGDGVSRYDLRQEGAKHFHHHLVCLECGSVEEIQEDLLEDVEKIVESKWNFLVKDHRLTFQGICANCRQKSKKE

SEQ ID NO: 2190 - protein, 257 aa, Listeria monocytogenes
MTKNFKKLKSLHELPTPLILYNCWDVASARAIQQGGAPVIATSSYAIAESLGAVDGEHLTFDEMFSVISRIAENVSLPLTVDIETGYARNLEELAQNVERLLAIGVCGVNLEDQLIGVTNPGLCSTEEQCDKIKTIKETAAKMSTEIFINARTDVFFQGRDEAVDLVEEAISRANAYKEAGADAIFIPGLLSPNLIRAFVEKSPLPVNVMRMDGMLSNEDLQKIGVKRISYGPFSFFQANLAIQQEVERIFEGGKAL

SEQ ID NO: 2191 - protein, 125 aa, Listeria monocytogenes
MSLPKDLLYTEEHEWVKADDGSYVIGITDFAQDQLGDIVFVELPEVGDTVTKGDSIGSIESVKTVSDFYAPVTGKVVAVNETLEDEPELINSNPYDTGWILKLEEVEEADVKALLSSDDYEKVLD

SEQ ID NO: 2192 - protein, 102 aa, Listeria monocytogenes
MEITDVRLRRVETDGRMKAISSITIDGEFVIHDIRVIDGNEGLFVAMPSKRTPDGEFRDIAHPINSGTRAKIQEAVLAAYEVADEPAVNEESSADESIVEEN

SEQ ID NO: 2193 - protein, 121 aa, Listeria monocytogenes
MAIEIDTKLGKIDITSDVIATIAGGAAEENFGIVGMASRHQIRDGLTDILRRENYTKGVIVRQEEEGIHIDMYIIVSFGTKISEVAHNVQERVKYTLEKTLGITVESVNIYVQGVRVIKES

SEQ ID NO: 2194 - protein, 267 aa, Listeria monocytogenes
MKILFIGDVVGSIGRDAITEYLPQLKKKYKPTITVINGENAASGRGITEKIYKDFLELGANAVTLGNHTWDNRDIFEFIDEAKYLVRPANFPDDTTPGTGMVFVKSNQHEIAVINMQGRTFLADLDDPFRKMDYLIEEAKKRTNIIFVDFHAETTSEKEAMGWYLDGRVTAVVGTHTHVQTSDNRILPEGTAYLTDTGMTGPYDAILGMEKEAVIRRFKTALPTRFEVPKTGRAVLSGCLITLDESTGKAQKIDRILINEDHPFSFD

SEQ ID NO: 2195 - protein, 182 aa, Listeria monocytogenes
MKLKRLQKMSYFLHIALKILSISSVIMVISVVLMRLFSSKNVMINKLESDTIFYFQTELFVGEDNLQFVQTEEWILLGVAAFSSIIIAYLLWTASMIFKDLATNFTPFSNITVSRLRRIAVLMLIYALVPQIIYSILHTVLIPGYSIKFGLNMSFFFALIFYCLTEIFRYGASLQKESDETL

SEQ ID NO: 2196 - protein, 149 aa, Listeria monocytogenes
MFQLMIFMIIRVFYFAIFYLLENEILVTAQFITNAYITLCIIWVISFAIFSFRFKKKLDKGGYRKDSKLQQKRSNLGLNLSKGTYFLILGSFGLFILIRMLIGGELEEIIISLFLIVCILIGIAGVSLFPEHLFTAYCKFNFKEFHIEE

SEQ ID NO: 2197 - protein, 173 aa, Listeria monocytogenes
MKKILGNTRRQLILKWLKEAETPISGNQLASKTNVSRQVIVQDISLLKAGNEPIMATPQGYIYAKETSFAGERRVIAVKHTKEQAVEELNILVDHGVSVVDVIVDHPIYGEITASLHLKSRFDVEKFIKKVQTTGATMLSGLTDGTHLHTIEADTKEQLEQAIEALEKAGFLI

SEQ ID NO: 2198 - protein, 175 aa, Listeria monocytogenes
MPLSPLDIHNKEFTRGFRGYDEDEVNDFLDQIIKDYEQVIKEKKRIEDTLNNSEERLGHFTNIEETLNKSLIVAQTAAEEVKASAEKEAKLIIREAEKNADRILSDSLSKARKIAIEIEDLKRQSKVFRERLRMLVEAQMDLIKSEDWQQMMAYDVDATELASIKEVESAESEER

SEQ ID NO: 2199 - protein, 127 aa, Listeria monocytogenes
LKKRWIVLFGIAIMIIFGLGIKFYMDEEKLNKEMIKVIYSDEAKQVFEKRLTNLDAKAFTKEGIIQSYKIDEGSIKSNPMGGIEVRLIINNNSELYASYTMSRNNGVLGGGGAIISKELARQTEVKD

SEQ ID NO: 2200 - protein, 191 aa, Listeria monocytogenes
MIEKTIMERRSIKKANDEPISRETVNTILEQAAYAPFHSKVEPWNVYVLHTLAEKERYIEKIIEFNEREQGVSFSEAEIADLKAGYAKKIITPPYLLIVTTNIIGHGKKDFESIGATSAFIQNIQLLGWEAGIGMIWRSNRFIFDAKFADDLGIPAEQKIVGTLHLTSLAEVPEAKPRRPLNEWVKNLADL

SEQ ID NO: 2201 - protein, 196 aa, Listeria monocytogenes
MNKQDFLNELNQRLELLDPKERRELLSDYQEHFRNGIEAGKSEEQIVFDLGKPEEIAADIISERGIREEPTEMDYYYVPRKNQNENRSVSKQILIGVGLFLLDVCLIIPIMVSLWSLVISLWVTVGAFLLSPVILGVGILFGADFEFYQMFVSIGLVGLGLMLLFVANALTQLTSKVTMAIIQWHKYAVKGGGKNA

SEQ ID NO: 2202 - protein, 110 aa, Listeria monocytogenes
MEVNPQFKKGVLELCCLFLIQKKDCYGYELANQVSKYIEVAEGAIYPVLRRLVKEEYCSTYLVESNEGPSRKYYQLTVKGEIYLNELISEWNNFTDSVAKLLTEGEAVNE

SEQ ID NO: 2203 - protein, 94 aa, Listeria monocytogenes
MKIDLEQIYILDFTMGLRFHPLIIRKNLPLLYVAFIFLIWIQGVVMAGLPGDFDTTELDVLLAAIPALPLLILYPKKMAMKFQNVQYLLYVCFN

SEQ ID NO: 2204 - protein, 137 aa, Listeria monocytogenes
MKPIYPAVKAVIVKDGKFLALKKKGVEGEVFELPGGRMNYGETHGEALFREVYEETKLQVQPFILYDTWEFFHEDFQITGVIYLVEMPEGGEIELSDEHEEYRFLPLEKESLNVMDIVFSSRMERWDFEAIKGFMRK

SEQ ID NO: 2205 - protein, 206 aa, Listeria monocytogenes
LKKTTMGIIASTISIIGIGCFLTVNTHAEKTKPEKKEVPTYAIHSDYTLDIDNPNEVVGDADYVFVGKVTQETGTDYKNETPIEQEDDSIKYIGEAYTNYKVEVISNLKNELAMDKEIVLQKQGGIREDGSAYDVFEDDQLPEVGNIYIFTAYTQDDGSLLVAGGNSTISFDEKTKKIDTEKEVSKTEEFELYEEAVENQVTPEEN

SEQ ID NO: 2206 - protein, 73 aa, Listeria monocytogenes
MTKPGKYEALFFPTKDGLLKIHAYGFNPCGSWGEVFATIGDQTICVKGFNRHKTIVRATKMIISATANRKNEF

SEQ ID NO: 2207 - protein, 247 aa, Listeria monocytogenes
MSADRSFTLKAGNRAVLLLHGFAGTTEDVRELGEILAENGYTVHAPNFRGHGDEPAIFLKTTPEMWYEDAVAGYRQLEKDGYNEIAIVGVAMGGVFALKMAESFSPKAIVPLCANVNRKMRYIPIENYLTKQLKKQGIVEQEADQMLKNYLPEIDVMTEARATFYKNVARDIEKIHVPTMIGQGCQDEEIDADNANYIFKHIHTNDKQLCFYAGSGHDIVNDCEKDILEEDLIYFLDDLVWLEEKVV

SEQ ID NO: 2208 - protein, 85 aa, Listeria monocytogenes
LAEVDKSTIGEVEGVTFQSYFLIKNMLHTRVVGDLEKRLPVTLEKMVEYVESNRKEIITPIFIVLNYVGNVPYVDVYVGIDPYDE

SEQ ID NO: 2209 - protein, 77 aa, Listeria monocytogenes
MSTVLTVLLIIVSVLLITVIILQPGKSAGLSGAISGGAEQLFGKQKARGLELILHRTTIVLSVVFFAILIALAYFVQ

SEQ ID NO: 2210 - protein, 88 aa, Listeria monocytogenes
MKKILIGGIRLYQKYISRFTPATCRFYPTCSAYGIEAIQTHGALKGSYLAIRRISKCHPFHKGGLDFVPPKKDKNADSEHSCKVHHHH

SEQ ID NO: 2211 - protein, 464 aa, Listeria monocytogenes
MTYKFPENFWWGSAASGPQTEGAADVDGRKPSIWDHWYKIEPGRFFNDVGPTNTSNFYYQYKEDIALMKQTGHNSFRTSIQWSRLIPDGIGEVNPKAVDFYNRVIDEMLANDVEPFMNLYHFDMPMSMQEKGGFESREVVDAYATFAKTCFELFGDRVKHWFTFNEPIVPVEAGYLYDMHYPNVVDFKRATQVAYHTTLAHALAVKEFHALEIPEGQIGIILNLTPSYPRSQNPADLKAAHIADLIFNRSFLDPVTKGEFPTDLVEIIREHDALPEYTEEDLAIIKNNIIDILGVNYYQPRRVKAKEYAAHPDAPFMPEHLFDNYEMPYRKMNPYRGWEIFERAIYDIAINLRDNYDNIPFFISENGMGVEGESRYRNADGMIEDTYRIDFIKSHLKWLHKAIEEGANCHGYHLWTFMDCWSWANAYKNRYGLVEVDLDNDFKRTVKASGHWYKELAENNGFED

SEQ ID NO: 2212 - protein, 425 aa, Listeria monocytogenes
MAIQPLAYRMRPKALDEIVGQTHLVGKDKIINRMVKAKQLSSMILYGPPGIGKTSIASAIAGSTKYAFRTLNAVTNNKKDMEVVAAEAKMSGTVILLLDEVHRLDKAKQDFLLPLLESGAIILIGATTSNPYIAINPAIRSRTQIFELKPLTIEDIMITMDRALSDKERGLGNYDVEIDEVAKKHFATASNGDVRSALNALELAVISSEPNEDGVIHITLDVAEECLQKKSLAHDKDGDAHYDVLSAFQKSVRGSDVNAALHYMGRLIEAGDLVSISRRMLVMAYEDIGLASPQAGAHTLAAIQTAEKVGFPEARIPLANAVIELCLSPKSNSAIMAIDAALADIRQGKSGEVPDHLRDGHYSVAEKLGRAIDYKYPHNYDNAWVDQQYLPDRLKNKLYYEPKFTSKFEQTIAGVYQKINENKAK

SEQ ID NO: 2213 - protein, 343 aa, Listeria monocytogenes
MLPEWKQIRSKKITPVYLIIGTEDYIINETKQLLIDNILEGEEVEFNYANLDLEEMPIEVVVQEAESMPFFGDKRLVMANNPLFLTTEKSKNKVEHDTAKLEAYLNEPVDYSVLCFVARVEKLDERKKLTKLLKKTATVIEAKRPNENELKKWIEAKLSENNMQMSQEAITRLIELTSGQLTTAMNELQKLMLYCFDTKEITIQDVESLVVRSLEQNIFLLLDKMIAMDISGALRIYYDLLKQKEEPIKILALISSQFRLLNQLKLLEQQGYSQQQAATKLKVHPFRVKLASKQAKNFTELQLNQALKRLAEIDLEMKTGFGDKEQKLEWFLFELQDNRQKRV

SEQ ID NO: 2214 - protein, 194 aa, Listeria monocytogenes
MDVNNVELIISAVRPEQYPETDLPEYALAGRSNVGKSSFINTMIRRKSMARISQKPGKTQTLNFYKIEEALFFVDVPGYGFAKVSKTEREKWGVMIETYITSREQLRGVIQIVDLRHKPTEDDRMMYEFLKYYDIPVIVIATKADKIPRSKWQKNAKIVRETLDFDPDDKFVLFSSETKMGKDEAWQFIKEGME

SEQ ID NO: 2215 - protein, 343 aa, Listeria monocytogenes
LKAVVKTNPGYDQMELKDVEEPQVYGDKVKIKVAFTGICGSDIHTFKGEYKNPTTPVTLGHEFSGVVVEVGPDVTSIKVGDRVTSETTFETCGECIYCKEHDYNLCSNRRGIGTQANGSFAEFVLSREESCHVLDERISLEAAALTEPLACCVHSALEKTTIRPDDTVLVFGPGPIGLLLAQVVKAQGATVIMAGITKDSDRLRLAKELGMDRIVDTLKEDLAEVVLGMTGGYGAERVFDCSGAVPAVNQGLPLTKKKGDFVQVGLFAEKKNAIDEESIIQREIAYIGSRSQKPSSWILALDLLANGKIDTDKMITKVYGLDDWREAFEAVMAGNEIKVLVKS

SEQ ID NO: 2216 - protein, 240 aa, Listeria monocytogenes
VKKNLEQIYAIEFTMGLRYRPMQIRHNIKLIFLLLLFVTWLQGDFMNRLPGNLDITKVDMPLVLLALLCYIILYPQKMTIRFQNLQYLLYICCFQFLVFMVIRYFYSNLIYGIQNMVSLTAQTLVASYVFLLVLWILALIFFYFHFRKKLRNGDYRKDSELQKKRSNLGLKLSKGSYILIGAFFVFILSSQIVGGIMVDIMIISIEIVGIALCSMGIVIFPEQLFTAYCKFKFKEFHIEE

SEQ ID NO: 2217 - protein, 399 aa, Listeria monocytogenes
LAKNRHLFTSESVSDGHPDKIADQISDAILDAIISKDPDARVACETTVTTGLVLVAGEITTSVYVDIPKIVRDTIKEIGYTRAKYGFDAETCAVLTAIDEQSPDIAQGVDEALESRSGNEIDAAIEAIGAGDQGLMFGFATDETEELMPLPIFLAHGLARKLTELRKTNKLDYLRPDAKTQVTVEYDEFNQPVRIDTIVVSTQHHPDITQEQIAKDLHTYLFPEVIDASFLDEDTKYFINPTGRFVIGGPLGDAGLTGRKIIVDTYGGYARHGGGAFSGKDPTKVDRSGAYAARYVAKNIVAAGLAKKVEVQVAYAIGVARPVSISIDTYGTSDYSEQELIDGVNALFDLRPAGIIHMLDLRRPIYRQTAAFGHFGRSDLDLPWERTDKAEALKKLIVK

SEQ ID NO: 2218 - protein, 216 aa, Listeria monocytogenes
MKKGLFSMVLVLAMVLVLSACGASRVEPKKAGEITVNAVVYNKDTDKVKDVYGEDGSKFEKEFETSFKESFISTFTASFSSDVNLDKQVDEFYDALRKQVNEKTSYTTKVTNDDKESPEIQFAIKGLDMKGVQTELVEELTKAATADPSIASDDQKMAEKTMEIYTKAVQNADAVSEAKTVTLKLKADPDDDSLWKMENDMAFMQELTTAFFMGGM

SEQ ID NO: 2219 - protein, 576 aa, Listeria monocytogenes
MVKYTNPKIEKLGVNAVSNYIVESDYLSDFLAQQSTEPATDGTIRIYNGPGERKRDLIGIVPVQVKGTTTKNIIKYNRHEIDIVDLTYYYKVGGVVYFVVYVTNKVPKIYYRDLLRIDIKEILKKNEKLRGKKEKGTITIDFREVPVNVEDFRTVLLNFHKDQDYQTKDYVELGSINEISRDLTFTIIAPNSNIVEALKYVSPVLYKNEGDLKIPVRRFKIGELSVFTKSEFSIGIKGANSYIATVMEGEEETEIQIGSLQQLIVKFKEGRFKVDFEAKGKIQETIELLEILLGIVTGVNLYIDNKPVTEFFIEEVNEDFISRVNHALESFKKTQEALNHCKVPSNFHYEELTENDIDVINSIMELYQTSIDNTWGKFEFNNRLVYLLKHKGTIYNLLDSNVALEINFWSKREDGIQYTTTPLILIDDFSKMNDTEICNIKGPIEKLIPIHEKACSDINLICVRLIDAYDQTNNNQFLLVAFELLELIIPFTTNNEIHLIYLNKYQIKKRWDNLVMEDINHLVSIQKEFEEDKRIHLATLILLSAKNDAAQLLSELKNNEGFSLEDMPILNLLEKN

SEQ ID NO: 2220 - protein, 183 aa, Listeria monocytogenes
MEKKVVKFFTVDNMEKEEAYLNEMAQNGWFFQKYKSFKYHFEQGEPAKYSYAIDFKENEGDEEAYKTLFEDAGWETVFSYPVLNGNWMYFRKAVAPGETEEAIFTDETSLIQLYKNIRKRWTIFGAIVSLFLFVELLIVFQIENHIGIATFIFIIFFILVSLYGKMFFNLTRKINNLATRKAS

SEQ ID NO: 2221 - protein, 103 aa, Listeria monocytogenes
MNEKLRKAYLPMTETAFYILLSLVKPRHGYAIIENVAKMTDDRIKLGPGTIYGSLSKMNKDNLIQIIQEESNRKIYQITEIGTDILQLEKARIEELYRNSREV

SEQ ID NO: 2222 - protein, 308 aa, Listeria monocytogenes
VSYVQINESFMEELALKKVKQERRKRLKWFVYKFLMITFGAILMGVGLELFLVNNRILDGGVVGISIIISQLTPLPLGVLTFVLNIPFFIIGYRKIGKVFALFTLYGIAVMSIVTLVLHDMDPVTDDLLLATVFGGMTLGLGVGLVIRNGGALDGTEIISIIINGRTPFSTGQIIMFINIVIFIVAGLVFNWDRAMYSLITYFLAYKVIDIVIQGVDESKSAFIISRYYEEIGAEIMEQLGKGVTYLDATGGYSGDVRKVVFVIVSRFEEVKVKAILDEIDPDAFLAVGGSMSEVRGGKLMNTKTPHL

SEQ ID NO: 2223 - protein, 299 aa, Listeria monocytogenes
MKLKKVAMGITVVMASSLLLVGCGSSDDSSKDKKSTDTKQTETKKTAKTDGTMTDGTYKLEEKNFDDKGWKGFMSIEVKDGKITKANYDYKNKDGKLKSEDADYEKAMKDKVGTGPQEYLKQLSDSLVKNQSAASVEVVSGATHSSDAFINYANQLIQAAQKADTTTISINNLAKMEDGTYKLEEQNYAHGYRVVFSMDVKDGKITKSDYNYVDKDGKLKSDDADYEKNMKAKSGTGPKEYIPALNKSLVEKQDVAAVDTVSGATNSSNQFKIYAAQLQNAAQNGNTDTIKVYNLVEAE

SEQ ID NO: 2224 - protein, 225 aa, Listeria monocytogenes
MNEINHTSERVNTEKRTEKQIIMQKILNWFVFSLLLASIGAAIGSKLSPELYLPLVVLEVALLITAMVVRRSKTINKVVGYPVVLAFAFVTGLTLGPTLTYYFGAGQGAAVLMAFVTATVTFTTLAFIGAKMKKDLSFLSSALFAAIIILVIFSFVGVFLPLGSMLSTIISAGGTIIFSLYILYDFNQIMKRDVELADVPMLALNLYLDFLNLFMFLLRLFTGRD

SEQ ID NO: 2225 - protein, 128 aa, Listeria monocytogenes
MKKMLVEFRDFALKGNVLDLAVAVVIGAAFGKIVSSLVDNIIMPLVGVLLGGLDFTDLSFKVGKSVIQYGAFIQSIVDFIIIAFAIFIFVKVLTSFIKKKEQTVEETPVPPTEEYLKEIRDLLKEQQK

SEQ ID NO: 2226 - protein, 97 aa, Listeria monocytogenes
MTVTSNINSELADGFQGYTDVRKITVNSTVDVGVSGSLTAVLGQVGSSFGLPGAIGGLGVGLVLDTILSLNGTKDTWKNSINEKMQDLEDWFRVEAK

SEQ ID NO: 2227 - protein, 104 aa, Listeria monocytogenes
MRAILIGVLIILLIAMILIVLLPAILAMVGAVLGFWSLKKLLEARSVGEKVIYGVLIGVGALIILANLKGILVVVIIGAIIYFLTRNKNKPRKNDDVFDYPYNK

SEQ ID NO: 2228 - protein, 152 aa, Listeria monocytogenes
MIKRTGEIVLAIIGLVLSLLAQAFIAIIGLLMISGSKGKEGLTTFYNNYYKTMTEWEIPKKEVPDPDRVLDFVQTLSWTALTGGLITLALGIFGIYYIFKNKKPVFAGYLFLAAGVVSLLSTALISFIPALLFIVAAILCFVRKPKSTFSGL

SEQ ID NO: 2229 - protein, 153 aa, Listeria monocytogenes
MKKYRFLKFNINAGSVTLLVMFSSFFILSVILSTLLSMTWEFYAILSALVIVCFFNFKKFFPGEVAVSEEAFYYKSKAYPYSKYIIECDAKLIRFKSPSARAIPYYRIVIINKDTRAEKLIKVHNAARRYKGANTQMQVEMEELRDQLKQYQS

SEQ ID NO: 2230 - protein, 107 aa, Listeria monocytogenes
MIDELKKYKKIIEDAVDLLGYTPLRYAIFEGEKNNRIEYQVRIEYIENHYEVYTTGERASISGKKQFENFFEAYHNFLFKLQLSILQNRRRVRDGEPPEYFCALWEK

SEQ ID NO: 2231 - protein, 101 aa, Listeria monocytogenes; identical to SEQ ID NO: 257

SEQ ID NO: 2232 - protein, 306 aa, Listeria monocytogenes
LQKKAMIIYNPAAGKNKFRKLLPDAEKILTEANFEVTLVPSTPAPKSTTFIAKQAAEAGFEVVIAAGGDGTVNEVVNGLMQVDTPPKLGVLPVGTTNDYARALNFAKDPLEALRIIAKQETIRVDIGKANETEFFINNAAGGKITEITYAVKESMKSKWGRLAYLFSGLTVLPKLSPVYVEIAYNDEIFKGKILLFFVNKSNSVGGMETLCPPAELNSGMFELLILKKVSPKKLFQLFASIKKGTHLSSPHVIHARTNKVTINSDADLNVSYDGVYGGKAPYTLEVIPEALEVFADKNRISSRLRG

SEQ ID NO: 2233 - protein, 96 aa, Listeria monocytogenes
MLKFDIQHFAHKKGGGSTSNGRDSESKRLGAKRADGQFVTGGSILYRQRGTKIYPGTNVGRGGDDTLFAKTDGVVRFERMGRDKKKVSVYPEVQEA

SEQ ID NO: 2234 - protein, 105 aa, Listeria monocytogenes
MIQVDVMREDNQIISFTMSGHADFAEHGSDLVCAGASSIAFGMVNAISEVRDFDPVIEESEGYLYYSVPADYVGDDVVQILLTGMENQLRSLAYSYPDHIKINSK

SEQ ID NO: 2235 - protein, 154 aa, Listeria monocytogenes
MRCPTCQYNGTRVVDSRPADDGNSIRRRRECEKCGFRFTTFEKVEESPLIVVKKDGAREEFAREKVRRGLIRACEKRPVSAEQIEEIVNEVERELRNIGDSEIASDLIGEKVMNKLANLDEVAYVRFASVYRQFKDISVFVEELKDLMEKNKDR

SEQ ID NO: 2236 - protein, 162 aa, Listeria monocytogenes
MIEIKKMTGTKEENYALALKQVQAMIHGEPNLIANLSNVSSIINQALSDINWVGFYLLEKETNQLVLGPFQGLPACIRIPLGKGVCGSAASDQKTYIVENVHDFPGHIACDAASNSEIVLPIVKNNQLLGVLDIDSPLFNRFNEVDQLWLEKIRDAIVQEIN

SEQ ID NO: 2237 - protein, 329 aa, Listeria monocytogenes
MRGQEEIDKEQYQVLFIKERLIPCVLGAVIGDCLGVPVEFKDREYLKQNPIVEMIGYGTYNQPKGTWSDDSSLTFALMESLISGYDINRIVNNMVSFMDDGFWTPYGEVFDIGSVTRESLNRYKNGVSVFECGGKDNFDNGNGAIMRIMPLVFYLGKDFSFGKKNKITEEVTRITHAHPRSILGSYVYIELLQNLFANMDKKLAYEEMQNYIRKNYSDYPFKDELQYYNNILEGNLYELKESNIKSSGYVVDTLEASIWAFLTTNSYKEAVLKAVNLGGDTDTIAFITGSLAGIYYKMEQIPVNWIDQIAKKEDILNLCNRFIESLIKQ

SEQ ID NO: 2238 - protein, 200 aa, Listeria monocytogenes
MARYTGPSWKVSRRLGISLSGTGKELERRPYAPGQHGPTQRKKISEYGLQQAEKQKLRHMYGLTERQFKNTFNKAGKLRGKHGENFMILLEQRLDNIVYRLGLARTRRAARQLVNHGHITVDGKRVDIPSYQVSVGQVISVREKSAKNSAIAESLEVSSFVPEYVTFDAEKLTGSLNRLPERSELAAEINEAFIVEFYSR

SEQ ID NO: 2239 - protein, 259 aa, Listeria monocytogenes
VIDVPVTVSAGGGELNLTKKEIKEELAYQKQLVEKLRNADDNEEKIVKEYLADNDNAIANKIGNSEDSTEFIDTYIINDETQLIFTDTEVMLDTTEMSNENEATSEEEKLLREEDSNESIISSIKEFGETVLFGQKVYAAASKTVSARHTRTVYAKVSGNKLFTAGIGAKFTYNGAKVTAQTTENYVKVNGISGVVWSVHNKKNGVQKPSIKKRVVYQQATAKSGLTYKGNGLVVEEKYIRVNLECNHLGKVSKSSVVR

SEQ ID NO: 2240 - protein, 78 aa, Listeria monocytogenes
MSLKKILESDESIEKKEQQIDSYYQSELITRVEACELLDVSTKSLDRYIKQNKLSFQLNSLLIPHFCLIVLLMPLAIL

SEQ ID NO: 2241 - protein, 107 aa, Listeria monocytogenes
MYQKASEKMKETMKANIALVESIRISSISNKKLQSDNKSGHTVVTFKDNKWVARICVSGVEHQLGSFVTKEEAIDARIEGEKYFQPLINKYNNRLDVFYSERRPFWT

SEQ ID NO: 2242 - protein, 135 aa, Listeria monocytogenes
MQNPTKEEIQHILKKAKVIAVVGLSDKPDRTSYRVSQIMQQAGYKIIPVNPNADEILGEKTVKHLTDIEEHVDIVNVFRRSEFLPEIAEAFDQIDADVFWAQLGIANQEAFDFLTEKGYPTVMDYCIKVAYQEMD

SEQ ID NO: 2243 - protein, 77 aa, Listeria monocytogenes
MYNLIDDILEHSIVLADALKRNWSIEVLFLKNNHHVRYKYVVPVYIDNKKHIVSLERFDERIIDINIEDIIFCEVMT

SEQ ID NO: 2244 - protein, 92 aa, Listeria monocytogenes
MKKEQISTQFYEVNPHTMIIFPKKSGSIVYSEIYEVDSHYTSKFTPFELIKTSCNFFGSSYEGRRINEIPKKNILSKGCLYFYYYIEETLFM

SEQ ID NO: 2245 - protein, 78 aa, Listeria monocytogenes
VEMRDFSNSLMNQVGVLKGEKELTNVFIECFLTMLLEERKLEQLRAEIDKALDNRNKAEFMKLTEKMNKIQQEMLAFE

SEQ ID NO: 2246 - protein, 171 aa, Listeria monocytogenes
ISKDMLVNDGIRAREVRLIDQDGEQLGVKSKIDALQIAEKANLDLVLVAPTAKPPVARIMDYGKFRFEQQKKDKEARKNQKVIVMKEVRLSPTIDEHDFDTKLRNARKFLEKGDKVKCSIRFKGRAITHKEIGQKVLDRFAKACEDLCTIEQRPKMDGRSMFLVLAPLHEK

SEQ ID NO: 2247 - protein, 94 aa, Listeria monocytogenes
LRTAQKKGEDFVVFFFTPMCGSCQIASRLVDVVIEADGIQTEVAKVNLNYVPDIAQSLEITSVPALVKFKNGQPADLSYQLHDATAIFEFLYSE

SEQ ID NO: 2248 - protein, 391 aa, Listeria monocytogenes
MGAKGKFWILTMVVAISGLSQGVLLPLIAIILEERGISAGINGFHATGIYLGVLLISPFIEAPLHKYGYKPIILVGGGLVAVSILAFPIWFNLYFWFILRLLIGVGDHMLHFSSQTWIGAMSDPSKRGRNMAIYGLFFSLGFAIGPQLVNLAEINANLPFFLSGILVLIAWGLVWFVRNDFVGEKAVIRKISFWGSLKRFSDVFKLAWVAMIPPFLYGILETGLNATFPVVGLRDGLDTMMIAMVISSFSVGTIIFQVPIGIVSDKFGRGKVLPLLTGAGAVVFVLTAFVKIPVLYVVFFFVLGILLGSLYSLGLSYMTDLTPLELLPAGNILVGMCFSLGSIIGPSATGMMIGIFGNQIFYFVVAGILVLGCLLLIFGARKDALEKKMKN

SEQ ID NO: 2249 - protein, 119 aa, Listeria monocytogenes
MPRVKGGTVTRKRRKKIVKLAKGYYGSKHLLFKVANQAVMKSYQYAYRDRRQKKRDFRRLWIARINAAARMQDLSYSKLMHGLKLAGIDINRKMLADLAVNDIASFNTLADSAKKALAK

SEQ ID NO: 2250 - protein, 77 aa, Listeria monocytogenes
LGRSFYHFLMTYRDPKLTDQKTEFANNAYRDHSFPKQTRNYHILCDYLEFNAPYLPGMSIFDELWDAYLLDEEKNKH

SEQ ID NO: 2251 - protein, 158 aa, Listeria monocytogenes
LNKKTNACRILDKQKVNYELREYAWSEDSLDALHVAEETGNNPAQIFKTLVLTGDKTGNIVACIPADKTLHLKHLAKISGNKKCELIAVDSLEKLTGYIRGGCSPIGMKKLFPTFIDNSAESLDTMLISAGKRGLQIELAPADLKKVVRAEFAMITEE

SEQ ID NO: 2252 - protein, 166 aa, Listeria monocytogenes
MKNKTIISKQNLVLIVIMVGATLTDQLSKIWITSNLQLGESIEIIPSFFKITYAQNTGAAWSILEGQMTFFYVITLVALILLGWYFYRLKDYQIIQKIGVALMVSGTLGNFIDRLLFQYVRDSLDFHILGYNFPIFNVADVLLICGVLFIIIDEVLKSFGVSYKKM

SEQ ID NO: 2253 - protein, 128 aa, Listeria monocytogenes
MAIKSISKSELEVMKIIWDFGRAVQYADVAGKLEEKNYSWKKNTVLTFLTRLVEKNLLSVKKVGRKNEYYALVSENEYLERQTETFVEEIYEGDVKGLITNLVQNDLISPDELEDLQQFWKRMKSPNE

SEQ ID NO: 2254 - protein, 120 aa, Listeria monocytogenes
MALNIEEIIASVKEASVLELNDLVKAIEEEFGVTAAAPVAVAAAGGAAAEQTEFTVELASAGDSKIKVIKVVREITGLGLKEAKELVDNAPKALKEGIAKDEAEEIKAKLEEVGANVEVK

SEQ ID NO: 2255 - protein, 166 aa, Listeria monocytogenes
MSKVLEAKQSAVEEIKTKLSASASTVIVDYRGLNVGEITDLRKQLRDAGIEFKVYKNSLTRRAVEANGYEGLEGALTGPNAIAFSNEDVVAPAKILNDFAKDHEALEIKAGVIEGKVASLEEIKALATLPSREGLLSMLCNVLQAPVRGLAIATKAVADQKEGQEA

SEQ ID NO: 2256 - protein, 251 aa, Listeria monocytogenes
VKLISWNVNGLRAAVKKGFLEYFEEVDADIFCLQETKLQEGQIELDLPAYKDYWNYAVKKGYSGTAIFTKVEPLSVQYGLGIPEHDTEGRVITLEFEEFFMVTVYTPNSQAELKRLDYRMTFEDAILEYVKNLDNTKPVVLCGDLNVAHEEIDLKNPKTNRKNAGFSDEERAKFSAFLDAGFIDSFRYFYPDLTDAYSWWSYRMNARARNTGWRIDYFVVSERLKDKLVDAKIHADVLGSDHCPVELELNL

SEQ ID NO: 2257 - protein, 125 aa, Listeria monocytogenes
MYNKAEIMKQAWNWFNDSNIWLSDIEWVSYTDKEKSFSVCLKAAWSKAKEEVEESKKESKHIAKSEELKAWNWAEIKLGLRFNISDDEKFTSVKDETKMNFDLNVWACAMKAVKLHNDLFPQTAA

SEQ ID NO: 2258 - protein, 116 aa, Listeria monocytogenes
MTLTTAQKRYYDAMNEFEAITSKELEQTPEFSQDLLNDSDYLAVTKNEAYAVALCLLDDDKLYLDETLVHSTRLDIEDETYYINFVVTNEDDFKLATDEDKEKHDKQEVIIKSGLN

SEQ ID NO: 2259 - protein, 201 aa, Listeria monocytogenes
LTNNHYYTNDETIKHNRKTWQVMLKGFNMSFTSDNGVFSKNTVDFGSKLLIESFELETKIGKILDVGCGYGPMGLTVAKAFPDSQIEMVDVNLRALELAKENAEINKITNTHIYESSVYDNVTANDYQAIISNPPIRAGKKIVHAILEGAYDHLQETGELWIVIQKKQGGPSAEKKMEEVFGNVETVAKDKGYFIFKSVKN

SEQ ID NO: 2260 - protein, 176 aa, Listeria monocytogenes
MGNYVALLRAVNVAGKNKVNMKNLKGALEEEGFQNVVTYIQSGNLVLSSILQTETEVAAKITKVIKAICELTIDVFVFSEQNYKQIIANNPFPPETIGEEERWMAAFYNENIDIPRQKNDQAEVIAIGRVLYVHVFSNQIHTLKLPVFLGQYKMALTTTRNWRTTLQLKTLLDSQE

SEQ ID NO: 2261 - protein, 92 aa, Listeria monocytogenes
MATTMRLDKYLKVSRLIKRRTVAKEVAEKGRIAVNGVTAKPGTNVKSGDELVIRFGPKIVTAKIERLEENAKKEQATEMYTIIKEERTDESR

SEQ ID NO: 2262 - protein, 102 aa, Listeria monocytogenes
MQVTDVRLRRVETDGRMRAIASITLDEEFVVHDIRVIDGNNGLFVAMPSKRGVDGEFRDIAHPINSDTRAKIQEVVLAEYERVGEEEATAVTEEESESVSAE

SEQ ID NO: 2263 - protein, 80 aa, Listeria monocytogenes
MYEKVEKIINDWDPIELFPLAPKDEYSQEINKIISIVQENPNIDMNVLGKGIRKIFIDSFGENLIFKNNEDEIAEKILAL

SEQ ID NO: 2264 - protein, 176 aa, Listeria monocytogenes
MTVEKWNVDPAHSSIEFQVKHMMVSKVKGAFSDFTADIEMDPEDLTSAKLNFSVAAASVDTRQAQRDGHLKSEDFFNVEKYPNVTFTATKITADGDDEYEVTGDLTIRDVTKPLTLEVSYEGTGKDPNTGNMVAGFEAKGKFNRKDFGLNYNAALETGGVLIGDEVKLNIQIEASK

SEQ ID NO: 2265 - protein, 211 aa, Listeria monocytogenes
MSKVLFIKASPLPNEVSRSSQVAETFMAEYKAKNPSDTVEELVLYNTEVPLLDLELMTAGRELQAGKAFTDLAPDVQKKLNAYNALTEQFLAADKYVFVFPLWNLGIPPLLKAYIDTFVIAGKSFRYTEHGPEALLKDKKAILIHGSGGIYSAGPTSSFTHGEPYLRTILQFIGINVVPSIFVEGIDHNPSKEAEIVAAAKAVAQESATEF

SEQ ID NO: 2266 - protein, 180 aa, Listeria monocytogenes
MTKNRRLVYIALLAAQAVVISLLERAIPFPFAFAPGAKLGLANIITCISLYTLSAKDTFMIICIRLVLSTLLGGTISTFMYSAAGAILSFLGMWLVQQLGPKRVSIIGVSVTGGILHNVGQLVIASWIAGTWSVMLYLPVLSFIGILSGIAVGIAANYLLKNVQTLRMFADAKQSQAAQK

SEQ ID NO: 2267 - protein, 350 aa, Listeria monocytogenes
MRAAVLYENNVIKAEQIDEATCGKDQVRVEVKAVGICGSDIHKMQTRWKYPLPAVMGHEFAGVITEIGSEVTNVAMGDRVAGIPLEPCMECNYCKAGDFALCDNYRMVGSHFHGGFAENVVMKADNVISIGDLDFEEGAMIEPLAVSMHGVLGIQPRLGDTVIVFGIGTIGILVVQCLLLAGVKDIIAVDISDKKLADAREFGCKYTINPKNEDLKERVFAYTNGLGADIALECAGSKITQEQCLLVTKKKGKVGFLGIAYADVLLHEEAFENIFRRELTLKGFWNSYSAPFPGEEWRTSIEFVKQGRIKLKPLISHRYKLEETKEAFDMILSREHDYNKVMILPQKGDD

SEQ ID NO: 2268 - protein, 84 aa, Listeria monocytogenes
MPNIKSAIKRVKTAETRNSRNASQRSAMRTAIKKFDEAAANNADNAKDLYVEASKKLDSAVSKGLIHKNNAARNKSRLAAKLAK

SEQ ID NO: 2269 - protein, 410 aa, Listeria monocytogenes
MKEELLKRFTKYVKVDTQSNEESTVCPTTPGQMELANILVTELKEIGMQEVTVDEFGYVMATLPSNSTKEVPVIGFLAHLDTATDLTGKNVQPQVHENYDGKDIILNKDLNVVLSPKQFPELAGYKGKTLITTDGTTLLGADDKAGITEIMVAMNHLINHPEIKHGKIRIAFTPDEEIGRGPERFDVEAFGAKYAYTMDGGPLGELEYESFNAASAKITFKGNSVHPGTAKNKMVNAVKMAMEFDARIPKDEAPEYTEGYEGFYHLISLNGDVEQARSYYIIRDFDHLKFVERKTHIASIAKELEEKYGEGSVELKLNDQYYNMREKIEPVKEIVDIVSAAMRNLDIEPKISPIRGGTDGAQLSYKGLPTPNIFGGGENFHGKFEYVALESMVKATEVIIEVARLFEEKE

SEQ ID NO: 2270 - protein, 138 aa, Listeria monocytogenes
METYLEIETLIKRIFNSFRHEVEAVLDKRLSGSEYRVLSLISSGLTKTSELAKTLDVSASHITAITDTLVEEELITRHRSEVDRRIIELKLTPNAEEFVKEIDKKKKEMIVKRFAVFSEYEQAEFRKLLKKLADGSIK

SEQ ID NO: 2271 - protein, 148 aa, Listeria monocytogenes
MTKVMIVYASMTGNTQEIADILGEELEKYDIEVEIEECISVDPEDLLEYDGALIGGYTYDDGQLPDEFVDFYEDMADVDFSGKVCASFGSGDTFYDEYCLTVDLVETRLKEQGATVPVAGLKVDLDPDEEDVVRAESYAKTFVEALKG

SEQ ID NO: 2272 - protein, 120 aa, Listeria monocytogenes
LYETMIAKAGVRELLGMDTSLIYGSFAYEMEDEWMDLTGLWISNENALIFYLENEDVYLLKKFAYEMIDSLEQKVSIISMTKKLILHLNNKESYTLLVANGEAKLFAARVNERIEKVSLG

SEQ ID NO: 2273 - protein, 59 aa, Listeria monocytogenes
MSAIAKFFRNVSSEMHKVTWPTRKELLTYTVTVVITVVLFALFFMLIDFGIEQIIKLIV

SEQ ID NO: 2274 - protein, 177 aa, Listeria monocytogenes
MEKNWYVVHTYSGYENKVKANLEKRVESMGMSDKIFRVIVPEEEETEVKNGKTKTIKRKVFPGYVLVEIVMTDDSWYVVRNTPGVTGFVGSAGSGSKPTPLLPEEADRILKSMGMVEKRAEADFEIGETVMVKEGPFADFSGKVDEMDNDKGKAKVMVNMFGRETPVEVDFNQIEKL

SEQ ID NO: 2275 - protein, 257 aa, Listeria monocytogenes
MFAFKNVYLKRDNKMILSDINWVVNDKENWAILGLNGSGKTTLLQLLNGYLWPSSGNLQVLGHIFGKTSLPELRKSIGWVSNALDHQLKEYELSEQIVLSGKFASIGIYEKVTTAEIDQAKKLLTDCGGITLIGKPYKILSQGERQIVLIARALMASPKLLILDEPCNGLDLFAKNRLLERIKKIAELPESPTMLFVTHHTEEILPCFDNIILLRDGEITHHGKTEKLLTEEVLQDFYQKPVELIRIKDGSIAVYPK

SEQ ID NO: 2276 - protein, 156 aa, Listeria monocytogenes
MDKAKQIYLEFKREADFLELDFPLFLGDGPGFGELCMDYSEQDGYMLYGYEHGKRNSEFKTTDFDEFKYEVFLHICWYMGMEFELRHRKEDIERDDNILETDTRKIAFEKTLQLLKMVNPAWIDKAAIGYSNYLNLWRKNKNVYFDKEAMQFKVNL

SEQ ID NO: 2277 - protein, 141 aa, Listeria monocytogenes
VAKKVIKEVKLQIPAGKANPAPPVGPALGQAGVNIMGFCKEFNARTADQAGLIIPVVITVFEDRSFTFITKTPPAAVLLKKAAKVEKGSGEPNKTKVASVTRAQVQEIAETKMPDLNAANVESAMLMVEGTARSMGITIQD

SEQ ID NO: 2278 - protein, 229 aa, Listeria monocytogenes
MAKKGKKYQDALKQIDANKVYTAEEAVELAKKIDFAKFDATVEVAFRLGVDPKKADQQIRGAVVLPNGTGKTQRVLVFAKGEKAKEAEAAGADYVGESEFVEKINQGWFDFDVIVATPDMMGEVGKLGRVLGPKGLMPNPKTGTVTMDVTKAVNEIKAGKVEYRVDKAGNVHAAIGKVSFDAAKLVENFRTVNDVLQKAKPAAAKGTYVKNLSVTTTFGPGIKVDPASL

SEQ ID NO: 2279 - protein, 201 aa, Listeria monocytogenes
MKQEEIIIAAQKWMQSHFEKETTGHDWEHIKRVWHLSKQIQVTEGGDKFAIELAALFHDYNDSKLTEDPLQATEIITTWLREKEIPEDVISKIIRIIQAVSFKNGKNPIQASTIEEKIVQDADRLDAIGAIGIARTFTYGGAHNREIANRDHPENTTLQHFYDKLLLIQTQLKTKTGRELAGEKQIIMQDFIHALEKELKI

SEQ ID NO: 2280 - protein, 101 aa, Listeria monocytogenes
VNVDPFGRKVELMIIGNGLDVKANLASTFVDYYKHRCKLMRLEYNEDDFYRLKSKNYFPMKVKMQQFPSIRRCNIEILSIDAETAINENITFWDLVLFFCL

SEQ ID NO: 2281 - protein, 122 aa, Listeria monocytogenes
MAILAFILTFIVMIEHIYIMILEMFFANTKLAAKTFGVEKELLANKKVQTLFANQGLYNGFLAAGLVWGLFFAGAGFAETVQIFFLSCVVVAALFGGATSSKGILVKQGLPAVLALVAVLLV

SEQ ID NO: 2282 - protein, 86 aa, Listeria monocytogenes
MNLDDLKNKVTESLPLENLGTLTEEATNKASELGEQASNVTENLQNEATNLTENLQDKASGLTENLQDTANELTGGFLDKIKNLFQ

SEQ ID NO: 2283 - protein, 221 aa, Listeria monocytogenes
MKNRITMIAGIVCLSILTACSSSESVKGTTSEEQTTSQSGAEMIKANNGVVSYHGKYLKLAENMDNLEKDAPIIIKATKKSEKTTVTKETKENVFPTDFYTMSDVQINSIEKDTTGKLSENMTIKVLEYSVENVLVEGEEYDLTIDGYKNMEKGEEYTLFLEKNPDGDNYILSNAVISKFPVEELSEEELFLDGGQATEETDSIEEIYQEVYQEVLEEYSE

SEQ ID NO: 2284 - protein, 93 aa, Listeria monocytogenes
MARDTAILRVTGFVQGVGFRYTTKHVAYKYDISGTVKNLDDGSVEIHAIAEEENLNKFIDAIKKGPSPGCRIEHVYIYKGAPVEERKTFDIVY

SEQ ID NO: 2285 - protein, 115 aa, Listeria monocytogenes
MTKWNVYLTKGEYEPWWFFEEWETSIQEDFSFSDKEAAFLKYQELAEALLSNYPKHQTKKDCLLAAWNEEEVEYCEDCEDDIQTFHGLILFFEGEVYQPTPEEKETIFKRVLTFA

SEQ ID NO: 2286 - protein, 93 aa, Listeria monocytogenes
VEILTVCGMGFGTSLMLLMEIQDMAKKHGFTVGGEATDLSSAKGRKCDMIVASSEIAKELAEEEVKVVPIINILDKKEIEEKVLPAIKQYFAS

SEQ ID NO: 2287 - protein, 51 aa, Listeria monocytogenes
MAVKRDMPEESKNSKVVKKEHFSIVFPDDIKEPATVEEKKKQDAEKKTDDN

SEQ ID NO: 2288 - protein, 73 aa, Listeria monocytogenes
MIILNCPMKRDYITELLETYDKDGVTFKKIDEKGMKLTFETNIEDEEKAAKIAKETIKATEIGSVLYFQVSVG

SEQ ID NO: 2289 - protein, 60 aa, Listeria monocytogenes
MKIVNALFLISIGLIIIMFSPSYGKDGMASVPLLVTGLAVVLIGCVFIVLKIRKDKKEKN

SEQ ID NO: 2290 - protein, 63 aa, Listeria monocytogenes
MKANDIRDLSTTEIQDQEKALKEELFNLRFQLATGQLENTARIREVRKAIARMKTIVRERELA

SEQ ID NO: 2291 - protein, 87 aa, Listeria monocytogenes
MADRNQRKVYTGRVVSDKMDKTITVVVETYKKHGLYGKRVKYSKKFKAHDENNIAKTGDVVRISETRPLSATKHFRLLEVVEEAVII

SEQ ID NO: 2292 - protein, 61 aa, Listeria monocytogenes
VAKKSMIAKQKRTPKYAVQAYTRCERCGRPHSVIRKFKLCRICFRELAYKGQIPGVKKASW

SEQ ID NO: 2293 - protein, 59 aa, Listeria monocytogenes
MAKLEITLKRSLIGRPQPQRKTVQALGLGKTNSVVVKEDNPAIRGMITKVSHLVDVKEV

SEQ ID NO: 2294 - protein, 94 aa, Listeria monocytogenes
MREIKVDERTFQQHATKLASESTGSYLPLKNGNMAYSKANSIDQLRSALIELVDVVEDFQHVTKKDASRLKKMGIAYAKQDQLMGQKINQLEVR

SEQ ID NO: 2295 - protein, 72 aa, Listeria monocytogenes
MQPPKKEAEKMDERFEKIYTQGKLNIMEIWVDKETGVQYVYHFAGYAGGMSPLLDVDGKPLLADLSKLNGAE

SEQ ID NO: 2296 - protein, 59 aa, Listeria monocytogenes
MIGPGSIALIVGAALVIFGPKKLPELGRAAGDTLREFKNATKGMMDDSKEETKKEDLRP

SEQ ID NO: 2297 - protein, 64 aa, Listeria monocytogenes
MKYVKSQMKELVKDSVDLQERLQKLMKEMDLEKTFALKALYHSEVADGGAYQTAYQDLDYKYKD

SEQ ID NO: 2298 - protein, 423 aa, Listeria monocytogenes
MDTLLSGVQYVLNLGPTVILPIMIFFIALIFRVPAKKALRSAITIGIGFVGINLVISLLSSNLGPAAQQMVERFGLNLTIIDAGWPAAAAASWASPVAAILIPICLVVNLALIFFKVTKTLDIDIWNYWHFIAAGATGYIVTGGNWWFAILCAIIYEVAVLWMADRTQPMVEEFYGLKGISLPTGSTAAFGFIGIPVGWLIAKIPGIKNIHVDPETIQKRFGIFGEPMMMGLILGIAIGILAGYDVGAVAQLGMSMGAVMFLMPRMVKILMEGLIPISESAREFMKSRFKGRELYIGLDAALSIGHPANISTGLILVPITLFLAVIIPGNKVLPFGDLATIPFYVSFVVASRKGNILHSVLAGTVVIALALLMATDFGLVHTEMMKGVYEFPKGATQVSTLDMGGNFFNWVILKFSQAWAAIF

SEQ ID NO: 2299 - protein, 67 aa, Listeria monocytogenes
LKVRNKVKQLREERGIGQNELALALEVSRQTIHAIEKGKYNPSLELSLKMARYFRLTIEEIFQLEEN

SEQ ID NO: 2300 - protein, 56 aa, Listeria monocytogenes
MAVPARRTSKAKKNKRRTHKGLTTPGLSRDSETGEYRMSHRISPDGTYKGRTIIEK

SEQ ID NO: 2301 - protein, 69 aa, Listeria monocytogenes
LANIEYEIIEEIGVLSENARGWRKELNKVSWNGRPPKYDIRDWSEDHEKMGKGITLTDEEAEVLKKLLD

SEQ ID NO: 2302 - protein, 91 aa, Listeria monocytogenes
MKEELLQAIEVGKPVLLVTAIGYIVGIVEAKGELIRLNDVYINCVSASRVNRFSRGLAVNINQVIGMQLLSKSEKDEMIGGWKAYVAPTAG

SEQ ID NO: 2303 - protein, 69 aa, Listeria monocytogenes
MAHENLRELEDQLIELRQTYQEVISETREFEDPQLQNGPINAAEVRLSALRHEIAEVEKKIKKAESKTE

SEQ ID NO: 2304 - protein, 58 aa, Listeria monocytogenes
VPWTKNDYPDSWKNLKKTEREKAIEIGNALLKDGYSESRAIPIATSKAEEWYKNHKES

SEQ ID NO: 2305 - protein, 69 aa, Listeria monocytogenes
MYIEIYTVNGESIRLDDDAKINNISIHELSKADLKNLFNEKCIELTKYDLTYFINTNQVNWFLVSEGIH

SEQ ID NO: 2306 - protein, 78 aa, Listeria monocytogenes
MKINHTIPLRIDFELGRTKQPVGSLLDVKKGTVFRLEDSTANVVKITISGKCIGYGEILTKDGKMFVKITKLGEGSSS

SEQ ID NO: 2307 - protein, 70 aa, Listeria monocytogenes
MVFPKKLVASIAVFISLGFIYFRVSTAVAFENTSSASLLPSTGDAFSVWPIVIGVVLVALAVVLFIKKKI

SEQ ID NO: 2308 - protein, 47 aa, Listeria monocytogenes
MLEGEIPEKYRSVDEEEINRSFGGSLPAVHAVVKSYLQIIWVTKWTE

SEQ ID NO: 2309 - protein, 48 aa, Listeria monocytogenes
LDNNQKDLNQVIRQLKEKGIVVEKTKSRKDIWKSVSSKAMPNMTLRLQ

SEQ ID NO: 2310 - protein, 88 aa, Listeria monocytogenes
PRCPNLDEPTVGIDPELRKTIWEELDDLKANGKCILVTTHVMDEAEKCDRLAMIRNGEIIAVGTPQELSSKTSSGKLEDAFLEFGGKH

SEQ ID NO: 2311 - protein, 53 aa, Listeria monocytogenes
MLGIIWGIIVVLLAVWLLGIIFHIAGGLINILLVIVLILVIWNLIQMARNKRK

SEQ ID NO: 2312 - protein, 75 aa, Listeria monocytogenes
MKKAILDRIEDGKAVFLLEPDQTEWQIDKEKLDSSIKEGDIVTISETNEIMKHPQETEEMKNRIAEKLERLRGRN

SEQ ID NO: 2313 - protein, 75 aa, Listeria monocytogenes
VKNKVGIIAGAVGAVAGVLACAAVYVVKKQQPPTPFDEVNDIRTRYADKEISETELEENNMISEGGVSSLQYEEK

SEQ ID NO: 2314 - protein, 78 aa, Listeria monocytogenes
MAFRENVLEILEEITETDEVVQNTNIKLFDEGLLDSMATVQLLIEIEEKLDITVPVSEFDRDEWATPEMIITQLEALK

SEQ ID NO: 2315 - protein, 69 aa, Listeria monocytogenes
MIFKVFYQETLTETPVREKTQSLYVEAESEVKVRQLLKDEPFHIEFVEKISDAHLAYEKENPDFALWEK

SEQ ID NO: 2316 - protein, 76 aa, Listeria monocytogenes
MKSTKEVLPFVVILQAVNGDVNAINQILKHFEHYIIRLSQKTLFDEYGNAYIHVEEEIKRMLETKLITAVLKFELS

SEQ ID NO: 2317 - protein, 73 aa, Listeria monocytogenes
MNFGQNLYNWFLSNAQSLVLLAIVVIGLYLGFKREFSKLIGFLIIALIAVGLVFNAGGVKDVLLNLFNRIIGA

SEQ ID NO: 2318 - protein, 505 aa, Listeria monocytogenes
MGVKYVEIEKIDNYIENPRHEVGLNELDTLKKLFDVSGYQNMINLAQDIYTNGLVNASLVTIVKLNNADRYTVYEGNRRVACIKLILHPEKFSFLPKNQIDRIKKMKSDTPSKINLSQIECLITDEEDAFFIMRRIHSGEDKGRGLKSWNTKEQEIFKLRTNPKNSTSIAKIISDKYEEFFKEDIQEEMAYTNIQRLFNNLEVRESLGIEKDNIDSFSCERLYLIKGVIEKVNQIAKIENLSISRKFNKRKIIEQIVIPIIEELKSKQLESKAINSIHIEQKNKSNKLSNSKEQQTQNKEATSNNGISVREDTGLKTEYKSIESISSTLKPKLPPKIGSGKLLSSTMPFTNLYHSNVRINTLVIEINQIRYKDFRLATQFLLRSLMEVYGHEYIDYFANLDYQDVQKMKAIAKDRIKRNQTVNEIYSEFISNHITKHFPKYAEQAELINISLSKNNNSSLMKILNFMVHSQNHIPDSIELIEAWYKVKSIVEAIDNILHEVKHNY

SEQ ID NO: 2319 - protein, 174 aa, Listeria monocytogenes
VDNGIFIVVTIFIVNILYVTIYTVRLLLTMKGYRYLAALSSVFEMIIYVVALSLVLDNLNNIANVLAYAVGFGVGIIVGMKIEERIALGYITVNVITKEYNLDLPNQIRDLGYGVTSWLASGRDGERMMLEILTQRKNERKLYKHIIEIDNGAFIVSSEPKQIHGGFWVKQVRK

SEQ ID NO: 2320 - protein, 91 aa, Listeria monocytogenes
MNNALGMIETKGLVGAIEAADAMVKAANVSLVGYEKIGSGLVTVMVRGDVGAVKAATDAGAAAARNVGEVQSIHVIPRPHNDVETLLQKGL

SEQ ID NO: 2321 - protein, 71 aa, Listeria monocytogenes
MKTVDTRRINTTKIRELRLQRGITQAFIARRMGYRYTSGYSNIEKGTVRLSHKNAVILSEILMCDLKFFYE

SEQ ID NO: 2322 - protein, 75 aa, Listeria monocytogenes
MLEKAKIDRINELSKKKKAGTLTSAEKVEQDKLRKEYIKSFRTHMKGTIENTTIIDPNGKDVTPHKVKQLRKNKY

SEQ ID NO: 2323 - protein, 49 aa, Listeria monocytogenes
MRVNITLECTECGDRNYITTKNKRENPERIELKKYCPRLRRVTLHRETK

SEQ ID NO: 2324 - protein, 70 aa, Listeria monocytogenes
VKTVYDVAQLLRKHGIIVYLGKRQYDIEMMEYEITELFKHNILDRETFARARSILKQELIKEQRKNSSLN

SEQ ID NO: 2325 - protein, 75 aa, Listeria monocytogenes
VATKKKTFEEAIAELETIVEALENGSASLEDSLDMYQKGIELTKLCQDKLQSAEKRMAKVVTDAGEEIPFEADGE

SEQ ID NO: 2326 - protein, 66 aa, Listeria monocytogenes
MEQGTVKWFNAEKGFGFIERENGDDVFVHFSAIQGDGFKSLDEGQAVTFDVEEGQRGPQAANVQKA

SEQ ID NO: 2327 - protein, 57 aa, Listeria monocytogenes
MSKTVVRKNESLEDALRRFKRTVSKSGTLQESRKREFYEKPSVKRKKKSEAARKRKF

SEQ ID NO: 2328 - protein, 102 aa, Listeria monocytogenes
MYAIIETGGKQIKVEAGQEIYVEKLAGEVGDVVTFDKVLFVGGDSAKVGVPFVEGATVTAKVEKQGRAKKLTVYKYKPKKNYHKKQGHRQPYTKLTIDAINA

SEQ ID NO: 2329 - protein, 72 aa, Listeria monocytogenes
MHKIMKKPVFVDGMLLLVASLVFLLGYATSMPYFRDSEIGWIWTTLIAGIITLFFTFFNDFLEKKKARSKVR

SEQ ID NO: 2330 - protein, 162 aa, Listeria monocytogenes
MPAVIGVIMGSTSDWDTMKKACDVLDELEIAYEKKVVSAHRTPDLMFQYAEQARERGLKIIIAGAGGAAHLPGMVAAKTTLPVIGVPIKSKALNGMDSLLSIVQMPGGVPVATVAIGESGAVNAGLLAAQILSITDDAITNRLQKRRATLEETVLESSDYLG

SEQ ID NO: 2331 - protein, 77 aa, Listeria monocytogenes
LYTYLDELTAELMVKNPHLDKEQALWWIEMLWSDFESSYAKAGYPYRGPEYAADYVRQQIERHGSFLHQVERKDPNK

SEQ ID NO: 2332 - protein, 68 aa, Listeria monocytogenes
LKLIGKHPSGRAIIIRLNNQEYHYETANSFGSATSLTRAKTEARADSFTSSEMDQGLHIGNWHWKELG

SEQ ID NO: 2333 - protein, 73 aa, Listeria monocytogenes
MNLETPSQENLNFMLTEITTKLKMVNVGVFENLELDSVDYNALVDIYQLIKRKSTFSPREMQLFAEELRRVRK

SEQ ID NO: 2334 - protein, 66 aa, Listeria monocytogenes
MPKMKTHRGSAKRFKRTGSGKLKRRHGFTSHMFANKSQKQKRKLRKSAMVSAGDFKRIRQMVAKMK

SEQ ID NO: 2335 - protein, 374 aa, Listeria monocytogenes
LDKKFLLTNSTIGIIGGGQLGRMLALAAKAMGYRIIVLDPTADCPAAQVSDEQIIADYDDKVALRELSEKADVVTYEFENIDYDALKMTQNLVSVPQGSELLSITQDRILEKAYLESANINIAPYAVIVEQDEIENEIKSIGYPAVLKTAQGGYDGKGQVVIHDARDIETAARLLRYGSCVLEAWIPFEKEISVVVARNLDGQIETFPVAENVHVNNILHTTMVPADVAADVYEEAEEIARKLAEVLQLCGVLAVEMFVTKSGAIYVNELAPRPHNSGHFTIEACSISQFTQHIRAIVGLPLVKPELLKPAVMINILGQHVDAVNKQMVNYPHWFVHYYGKKEAKINRKMGHVTVLADEPKAVIQDLEETQIWK

SEQ ID NO: 2336 - protein, 76 aa, Listeria monocytogenes
MEELILSIVKPLVDHPEDVVITPEETDTSLTYKLSVSKEDMGRVIGKQGRIAKAIRTLVYAVGSKNDKKIRLEIIE

SEQ ID NO: 2337 - protein, 77 aa, Listeria monocytogenes
MAEVLEKVTKIIVDRLGVEESKVTLEASFKEDLGADSLDVVELVMELEDEFGVEISDGDAENINTVGDAVKYIEANA

SEQ ID NO: 2338 - protein, 62 aa, Listeria monocytogenes
MAKECVITGRKSRSGNKRSHAMNSSKRTWKANLQKVRILVNGKPKKVWVSARALKSGKVERV

SEQ ID NO: 2339 - protein, 67 aa, Listeria monocytogenes
MLYPSIDNLLLKIDSKYSLVTVAAKRARYMQLENDKGVLPSYQSDKFVGKALEEIHAGKLVLQNDDK

SEQ ID NO: 2340 - protein, 68 aa, Listeria monocytogenes
MEKLTLNVEGMTCSHCEARVTKALSEVNGVKSAVVSLDEGTATVEFEKGQVMEDALIDAVEEAGYEVA

SEQ ID NO: 2341 - protein, 66 aa, Listeria monocytogenes
MQNGKVKWFNNEKGYGFIESDGGEDIFVHFTAIQGDGYKSLEEGQAVTFEVVEGNRGAQAANVEKA

SEQ ID NO: 2342 - protein, 66 aa, Listeria monocytogenes
MQTGTVKWFNSEKGFGFIEVEGGDDVFVHFSAIEGEGFKTLDEGQSVEFEIVEGQRGPQAEKVTKL

SEQ ID NO: 2343 - protein, 430 aa, Listeria monocytogenes
MLERYTRKEMGNIWTEQNRYQAWLEVEILACEAWAELGDIPKEDVAKIRANAKFDVDRIHEIELETRHDVVAFTRSVSESLGAERKWVHYGLTSTDVVDTANSYLLKQANEILRKDLENFIAIIGEKAKEHKYTVTMGRTHGVHAEPTTFGLKLALWYEEMKRNLERFNFAADGVEFGKISGAVGTYANIDPFVETYVCEKLGTTPAPISTQTLQRDRHAEYLATLALIATSVEKFAVEVRALQKSEVREVEEFFAKGQKGSSAMPHKRNPIGSENVTGLARVIRGHMVTAYENVPLWHERDISHSSAERIILPDSTILLDYILNRFGNIVKNLTVFPENMKRNMDRTLGLIYSQRVLLALIDKGLAREAAYDVVQPRAMEAWEKQVPFRELVEQDATITENLSAEEIADCFDYNYHLKNVDLIFDRLGL

SEQ ID NO: 2344 - protein, 63 aa, Listeria monocytogenes
MLRYIELFFMFAFVTLITMWIQALLAKWQPTILRSFWLRTLTFIIIGYALMAPTLYIGSLLLK

SEQ ID NO: 2345 - protein, 67 aa, Listeria monocytogenes
MKNSLMKQSFLYFALGLVFVYFVVVRVADYGYDVLAYILIIMTLMDFGIGIGLIITGFKRRKKTCRK

SEQ ID NO: 2346 - protein, 75 aa, Listeria monocytogenes
MQLNETAVGEKVRISELKIENAMLKRRLLALGCDEGCDICIKQKGLFGGPCTFETKGQYISIRQCDACAIMVERR

SEQ ID NO: 2347 - protein, 76 aa, Listeria monocytogenes
VRQQQIDFKWLEENFLTANEAATYLGISKQALLSLAKRDVLPFTKKGNMVLFHRMDIELRLEKQQSLREKYRPFET

SEQ ID NO: 2348 - protein, 237 aa, Listeria monocytogenes
VTNELVYEGKAKRLFKTEEAGVLRVAYKDDATALNGVRKESFAGKGELNNQITSLIFSHLAEAGIESHFIRAISETEQLVKEVSIIPLEVVVRNVMAGSLAKRLGKEEGEQIPNAIVEFYYKDDALDDPFINDDHVLYLEVATTSEMDTIRQAARSINKVLQELFNQMNITLIDFKLEFGRDAAGEILLADEISPDTCRLWDKETNQKLDKDVFRRNIGNLTDVYTEVLNRLKQVQN

SEQ ID NO: 2349 - protein, 58 aa, Listeria monocytogenes
MKLAGLVLLLIGLIGFGFSFSITGLIGFGVCIISIILVIAGIFTMIRSKKRRKRSYSY

SEQ ID NO: 2350 - protein, 61 aa, Listeria monocytogenes
MSEDKGMKDKAKGLKDKVVGDAKDKFGKATDDKGKQVEGKAQKAKGEVEDKTGDAKKKLSE

SEQ ID NO: 2351 - protein, 62 aa, Listeria monocytogenes
MRYVVTVFWVFLLSLMAEFVLSSMLYVSFDMTRAIILTVGLSFFIILITFLMPKDSEVYDFK

SEQ ID NO: 2352 - protein, 63 aa, Listeria monocytogenes
MEERLYELEDKVQDLELEVHDLRDRIQLLEDKPDVRSSLLGHNVWVLIPLVAIISWMVVEIFS

SEQ ID NO: 2353 - protein, 69 aa, Listeria monocytogenes
MTKKTTSDAQLKANKAWQDKNKEHANYLKSRSAARSFIKKKATLEDLEELEIAIKQRKTEIISLDNSPE

SEQ ID NO: 2354 - protein, 52 aa, Listeria monocytogenes
MAYMIPIYVNLVMNNRKTIEEVPANLRGQVKAKVDELKQEQQQIQSEEIEAE

SEQ ID NO: 2355 - protein, 54 aa, Listeria monocytogenes
MQIEKLNVFTRETICDGKDVEIANYNIEFEAISEESFIDTAEKVEKIREFIENL

SEQ ID NO: 2356 - protein, 81 aa, Listeria monocytogenes
MYNVKVYVTLKKSVLDPQGVAVKDAAKSMGYEEVEDVRIGKFMELKVAKSDRDIHEVLNEMCDKLLTNPVMEDYRYEIEEA

SEQ ID NO: 2357 - protein, 60 aa, Listeria monocytogenes
MTADTAIKKLRNRSMSIRQMANAIAEVTNYQISEIESMGDEEIEAKYTAFVINEANEYAK

SEQ ID NO: 2358 - protein, 59 aa, Listeria monocytogenes
MKYKITYLSQEVYEVEAENEEEAIRIAEFNPMYRPDAHIKLIEDENLLDCELMKEREDE

SEQ ID NO: 2359 - protein, 55 aa, Listeria monocytogenes
MKHKIVQVGFLADKGEELIKLLDDGWKILTATYVGDNIEQMGGLVQYVLRKEAEE

SEQ ID NO: 2360 - protein, 65 aa, Listeria monocytogenes
MELYAIVDEDLQVAKHRSKGTLAVFKDLEMLKKHAWRYKESGKLYKIAELEPINFFSFEEAEGEA

SEQ ID NO: 2361 - protein, 64 aa, Listeria monocytogenes
MDNFKTIHYGFKVVIHDYDDELTPLYNLLKKQSTNLEGSKLFDELIDIHEKLAKKIEQREGVQA

SEQ ID NO: 2362 - protein, 71 aa, Listeria monocytogenes
MSEVLVSASYEGYESKSINFTEINNIVKERFKKIDEVERKKRAETFNKKYEVTKELVDGHLREIIIPRRTL

SEQ ID NO: 2363 - protein, 80 aa, Listeria monocytogenes
MRIWLKKIREENGLTQQDVAELADVERTTYASIEQGRRNPSVVNAMRIASVLDFEWTIFFDDKVREKSHFYLNEKQEARK

SEQ ID NO: 2364 - protein, 227 aa, Listeria monocytogenes
MKFAVIQFPGSNCDLDMLHAIRDSLGEEAEYIWHAETSLAGFDAVLLPGGFSYGDYLRTGAIAKFSSIMPEVLRFAEMGKPVLGVCNGFQILTEIGLLPGALIRNNNLHFICKTVPLRVANASTMFTELYEEGEIIQVPVAHGEGNYYCDDETLLKLKENNQIVFTYDSVNPNGSRADIAGIVNERGNVLGMMPHPERAVEEIIGGTDGLRLFESVVKAWKEEQVNA

SEQ ID NO: 2365 - protein, 77 aa, Listeria monocytogenes
MNPIVEFCVNNLASGADAAFAKLDADDNLDVIEYDCLTYCDLCATSLFALVDGEVVRGETAEELVANIYTFLEENPF

SEQ ID NO: 2366 - protein, 52 aa, Listeria monocytogenes
MENDSLCGGHILQEGLHVRFARMHIWAVTRYTSNGRMGMRIFDRWWMDFGGG

SEQ ID NO: 2367 - protein, 67 aa, Listeria monocytogenes
VVVTNIVKIIREKKGITQNELAHSLDVSRQTIHAIEKGKYNPSLELSLKIAKFFDLPVEEIFNLEGE

SEQ ID NO: 2368 - protein, 54 aa, Listeria monocytogenes
MTDNLFPNLSHENCKETMPPVTTEQFKEAAILEKNRKLEEILNIVDKKKPNIKK

SEQ ID NO: 2369 - protein, 739 aa, Listeria monocytogenes
MPNMEPTTKEIKEQKIYQEMGLTDSEYELVCSILGREPNYTETGLFSVMWSEHCSYKNSKPVLRKFPTEGKQVLQGPGEGAGIVDIGDGLGVAFKVESHNHPSYVEPYQGAATGVGGIIRDVFSMGARPIAMLNSLRFGELDTPHAKYLVSEVVAGIAGYGNSIGIPTVGGEIQFDPCYTKNPLVNAMCVGLIEAKDIQKGQAKGIGNPVMYVGAKTGRDGIHGATFASVEFSEEGEQQRSAVQVGDPFMEKLLLEACLDVIRDHSDILVGIQDMGAAGLVSSSSEMASKAGAGLELIMDDVPQRELHMTPYEMLLSESQERMLLCVKKGHVEEIQALFERYGLEAVVIGQVTDDKMYKIIHHGEVVANVPVDALAEDAPVYHKPSKEPTRYQAFQEEEAFVPAMDDVVGVWKELLAQPTIASKRHIYEQYDYQVRTDTAVVPGSDAAIVRVRGTEKAIAMTTDCNSRYLYLDPEVGGAIAVAEAARNIVCSGGKPLAITDGLNFGNPEKPEIFWEIEKAADGISAACLELDTPVISGNVSLYNETDGTGIYPTPVIGMVGLVEDLAHITTQDFKNSGDVIFLIGETKAEYSGSELQKLQQGKISGRAPELDLVTEKKYQQLLLTAIQEGLVASSHDLAEGGFGVALAEATFKAGLGAEVEVPFALNQLFSESQSRFLVSVKPENEAAFAQLMELEKVYRLGVVTEDDTIRVKHKEDQVTAKTTELRSIWEGAIPCLLK

SEQ ID NO: 2370 - protein, 66 aa, Listeria monocytogenes
MKKLYKSSSQKMIAGVCGGLAEYFGIEVTIIRLLWAGAVLFFGTGILLYIIAAIIIPKATPESEWE

SEQ ID NO: 2371 - protein, 79 aa, Listeria monocytogenes
MDQIISALIFPCLLVILFARITYNRYVGLLLMVILIAASAKLGYTSSMWLIIIDAFSMTIGFVLATYMLRRLKKSGSDF

SEQ ID NO: 2372 - protein, 72 aa, Listeria monocytogenes
MSLGVIAAAIAVGLGALGAGIGNGLIVSKTVEGVARQPEARSMLQSIMFVGVALVEALPIIAVVIAFMVLNK

SEQ ID NO: 2373 - protein, 81 aa, Listeria monocytogenes
MKTGIHPEYRPVVFVDTSTDFKFLSGSTKSSSETIKWEDGNEYPLLRVEISSDSHPFYTGKQKHATADGRVDRFNKKYGLK

SEQ ID NO: 2374 - protein, 61 aa, Listeria monocytogenes
MPFVTIQFLEGRTDDQKKALVSEVTEVVSKNLKAPKENIHVILEEMKKTDYGVGGVRKSDI

SEQ ID NO: 2375 - protein, 66 aa, Listeria monocytogenes
MNSFWKIFFTVILGFIALNIVLDIVGITLHFLFPVLILGGIGYLLYRMWGNSPKRPSRDNEDRYNW

SEQ ID NO: 2376 - protein, 68 aa, Listeria monocytogenes
VKFDLENGYVVKADGEMLVGGKFVVFKDSMKNWEPPYENKKLSESEVQEIIQQVKQSTNENTVQISFE

SEQ ID NO: 2377 - protein, 28 aa, Listeria monocytogenes
MPDWDFNNPESMKAWDLASGSYAEQVSG

SEQ ID NO: 2378 - protein, 92 aa, Listeria monocytogenes
MEYKNGENRIYAVNDEGVEVGEVTFVPTGEDMFIIDHTGVDDAARGQGIAQELVKRAVEKAKSEGKKIVPLCPFAKAEFSKKPEYQEVEASK

SEQ ID NO: 2379 - protein, 77 aa, Listeria monocytogenes
MDEETLLERGYRKYRGADVDIYFNTNVCEHSGNCVKGNVELFNLDRKPWIMPDNVSKEEAKRVIHTCPSGALQYIEK

SEQ ID NO: 2380 - protein, 475 aa, Listeria monocytogenes
MLAEVKGLNEECGIFGIWDHPNAAEITYYGLHSLQHRGQEGAGIVSTDGEILKGHRNLGLLADVFKHGELDDLKGKAAIGHVRYATAGQKNLGNVQPFLFHFHSSSLALAHNGNLVNAKSLRRELEEEGAIFQTSSDTEVLAHLIKRSHTGDFVEDLKVALNKVKGGFAYMLLTEDTMYAALDPNGFRPLSIGRIGDSYVVASETCAFETVGAEFVRDVEPGELIIINDDGLRIEKFTENVKHSICSMEYIYFARPDSNIAGINVHSARKRSGKRLAKEAFIDADVVTGVPDSSISAAIGYAEEAGLPYELGLIKNRYVARTFIQPSQELREQGVRMKLSAVRGVVEGKRVVMIDDSIVRGTTSKRIVQLLREAGAAEVHVRIASPPLAYPCFYGIDIQTRNELIASNYSVDEICRIIGADSLEYLSEEGLVDSIGRPYPNEPYGGLCMAYFNGDYPTPLYDYEAEYLASLEAEK

SEQ ID NO: 2381 - protein, 67 aa, Listeria monocytogenes
VKLPPEADYLNDETLEVYENDKKKYDQTNQLITNNSVTILLGDFCYYESAWSSRWRDNRFWIGSKVS

SEQ ID NO: 2382 - protein, 53 aa, Listeria monocytogenes
MKNMNKSVGKFLSRKLEEQSMKVADSSMSKACFMFVYEPKSPFVKMQEKNENK

SEQ ID NO: 2383 - protein, 79 aa, Listeria monocytogenes
MAGGRRGGRRRKKVCYFTSNGITHIDYKDVELLKKFVSERGKILPRRVTGTSAKYQRKLTVAIKRSRQMALLPFVAEEK

SEQ ID NO: 2384 - protein, 349 aa, Listeria monocytogenes
MAENAYSKAGVDVEAGYQVVERIKKHVARTERIGAMGALGSFGGMFDLSSLNLKEPVLVSGTDGVGTKLLLAIEADKHDTIGIDCVAMCVNDILAQGAEPLFFLDYIATGKTDPVKMEQIVKGVADGCEQAGAALIGGETAEMPDMYGADDYDLAGFTVGAVEKQKLITEGAVQAGDTLIGIPSSGIHSNGYSLVRKIFFKDNEFTLDAEISELDVPLVEELLKPTRIYVKPVLEVLKEVTVHGITHVTGGGFVENLPRMLTNDLAVKVELGSWPMLPIFDVVKKYGQLNEMEMYEIFNMGIGMVLAVAKSDVEKTLEVLVQNGEAAYVIGEVTTRESNAVIFAGGKKG

SEQ ID NO: 2385 - protein, 346 aa, Listeria monocytogenes
MNELLKIFLSMALTSVILIPLVWILRRIFNRYLSKGKIYYSWLIVFFFLTIPFAYIFFSFTKDNAFMWRNKTEFDGVTSIVMDQSGIVLQHDFKTVFWMTVLDYIWVAWLVIFLLTFIYRIASYRNFKKYVFSGARRVDDLEQLDILAETIEELNIKRPVELMINPLISSPIFLGLKKNVIVIPDETFSNVELHYIFKHELVHCKRKDMYYVWMVQFFTCIYWFNPLMYLMNKRIQMDRELACDEAVLATLSKSKYIGYGDTLLSSLAKSGNYKESYVAVSLHENTKALKERLMFIANYKAQNKKHNILFSISMIVLCIVGVLFSAFQADVFTLEKKKGITIERRK

SEQ ID NO: 2386 - protein, 257 aa, Listeria monocytogenes
MKTKMPEMLSFISEEAVSRKMTSEEIAAHFGYDKHHFSRKFKEINGFSVVEFLSSLKVEKAIIELDEEVRILDLQEHSGFESSGSFTNTFKKYTGSSPRKYKTEMNDIFYDMKRFENDNKDKSIAHFQENNDSFCNVTIDVPDEFEKGIIFIGLFRTLIPNHMPISGLATKNLIGNQLKNIPSGDYYLLACAISQSNNILSYFNLSNSLRGKEDEKLSFPKCSGNHYAIKLRKPIPEDPPILANVGKILISCLKNTI

SEQ ID NO: 2387 - protein, 118 aa, Listeria monocytogenes
MALNAKSITIGLPVSDLEKSASWYEKLFMSDEKLTPVEGVIEYQIGSVWIQLFEEKINVSENVLRLGVEDLDVEFERLKTLGVITDEVIEDVPGIIRYFVFSDPDGNKLSFYWLYEEE

SEQ ID NO: 2388 - protein, 188 aa, Listeria monocytogenes
MNIAIFASGSGSNFQALVDDEFIKPYVKLLVCDKPNAYVLERANKHDIPVFLFEAKNYPDKEAFETEILLELRRLEIDLLVLAGYMRLIGPTLLAEFPEQIVNLHPSLLPEFKGKDAIGQAIQANVSGTGVTAHFVDAGMDTGPIIDQVKVTIETAETTDTLAEKIHQVEHIFYPKVIRGLIQNGGND

SEQ ID NO: 2389 - protein, 44 aa, Listeria monocytogenes
MKRTYQPSKRKRKKVHGFRTRMSTKNGRRVLASRRRKGRKVLSA

SEQ ID NO: 2390 - protein, 37 aa, Listeria monocytogenes
MKVRPSVKPMCEKCKVIRRKGKVMVICENPKHKQKQG

SEQ ID NO: 2391 - protein, 509 aa, Listeria monocytogenes
MKRALISVSDKNGIVPFAEKLVELGVEIISTGGTKAAFEQAGVPVTGIEEVTEFPEMLDGRVKTLHPAIHGGLLARRDTAEHMEAIAAHNIKPIDLVIVNLYPFQETIQKPGVTLEEAIENIDIGGPSMLRSAAKNYAAVTVVVDTADYDAVLTELQEHGATTFETRQRLAAKVFRHTAAYDALIAEYLTNITGETFPEKVTFTYNRKQVLRYGENPHQDAAFYTEPGTIENSISAAKQLHGKELSYNNIRDADAALKIASEFTEPVAVAVKHMNPCGVGVGENIEEAYLKAYEADETSIFGGIVALNKEVDAKTAEHMSKIFLEIVIAPSFSEEAFAILAKKKNIRLLTVPFAGNMEGFEKTSVNGGLLIQANDSLVEDTTSYEVVTEKQPTDSEMKALLAQWKIVKHVKSNAIVVGSDKQTLGIGAGQMNRIGSALIALEQAGEKAKGAVLASDAFFPMDDTVEAAAKSGITAIIQPGGSIKDKESIAMADKYGISMVLTHVRHFKH

SEQ ID NO: 2392 - protein, 420 aa, Listeria monocytogenes
MNLLVVGSGGREHAISKKLLASNNVEKVFCAPGNDGMRLDDIQLVAISETDKAGLIDFAKKAEIAFVIVGPEVPLLEGVVDALEEAGIKAFGPKANAALIEGSKDFAKQFMEKYAIPTAASRTFTDYAEAKAYLNERGVPIVIKADGLAAGKGVTVALEMEEAVLALKDMMLEEKFGDASLKVVIEDFLAGEEFSLMAFVNGEEVYPMSIAQDHKRAYEGDKGPNTGGMGAYSPVPHISEAVIEEAVQKILLPTAKGMVKEGRYFRGILYAGLILTADGPKVIEFNARFGDPETQVVLPRLESDFAALIDALLHNEKPDVRFKKTGLTLGVVLASAGYPEHYEKGNKLTGLNDIAEDVAIYHAGTKQDENGDFISDGGRVLLLAKEAETMSDARTLLYPEMQKLDNPNFFYRIDIGTKAE

SEQ ID NO: 2393 - protein, 57 aa, Listeria monocytogenes
MAVPFRRTSKAKKRKRRTHVKLQLPGMNECSNCGEYRLSHHVCPECGQYDGKDVANS

SEQ ID NO: 2394 - protein, 45 aa, Listeria monocytogenes
MLHIITLSLAILMALQTIYFFIRKNVNMGVMFLLITAALLLLSTI

SEQ ID NO: 2395 - protein, 93 aa, Listeria monocytogenes
MGQFKILVACGAGIATSTVVTDRVERLVKENNVDAEVKQIKISEAASMQDGADLIVSTTILPTTYKIPAIIATSYITGMGMEELDEEILAHLK

SEQ ID NO: 2396 - protein, 98 aa, Listeria monocytogenes
MQIEKLRGQGLDEFFQGILTLENLEECYAFFDDVCTVNEIQSMAQRFQVAKMLHDGKTYNVIESETGASTATISRVKRSLHYGNDMYDVVFSRMTKPE

SEQ ID NO: 2397 - protein, 84 aa, Listeria monocytogenes
LKKFNSKTYQIVIISILALAVIYFVINMISTGTGLDFSLLWHWVFIICFIFTTLANVREKRAIGTAIGLSGILICVTSIVLMAI

SEQ ID NO: 2398 - protein, 451 aa, Listeria monocytogenes
MQENREEWGSKVGFILASAGSAIGIGAIWKLPYVAATAGGGAFFLLFLVLTLLVVMPLLIAEFVIGRGSGGDAVQAYKTLAPGTKWSLLGKLGVVGASILFSFYSVVGGWIITYLIKTLAGGIAGENQASLLHDFQVTTANPWISVGATILFILLNVIVISRGVVSGIEKMSKFMMPALFILFIVLIIRSLTLPGAMEGVAFFLRPDFSHFTAQTVLITLGQAFFSLSVGISVMVTYSSYLNRSTSLPQSAISVSLMNVFVSLLAGLAIFPAAFSFNITPDAGPGLLFVILPSIFNQMPFGMLFFIIFLILFLFAALTSSFSMLEATVAPLMNAGVNRKKASLWMGLVIVLMAIPSALSFGVWSDVQIFGLSIFDAADYLVSNIILPVGALFIAIFVGYRLPRELLLKEFTTSSHFGKKVFIVWLFLIKYIAPIAIILVFLSATGLIDFLF

SEQ ID NO: 2399 - protein, 65 aa, Listeria monocytogenes
LDKTQIALIIPVILLYLALLLTAIIDLTKNWNTRKNPIIWLIVIIVINIFGPIAYFIFGRKEEVN

SEQ ID NO: 2400 - protein, 177 aa, Listeria monocytogenes
MRKKTLAVFLIFTVLVALLAPTNASAYTKLGYVMTKSSAKNFKIYINGSAKGFKNIIISGAKAWNPSPYLNTVSIGNDVRPNYTVSSSGTNKGSVLAVCNTTYYKSNKLISKNEITLYKGFRSLSTNHKIETIVHEFGHGFGLGHVKTKNAIMLDKGFINKTKPQTDDFNGIKALYK

SEQ ID NO: 2401 - protein, 225 aa, Listeria monocytogenes
MKHLFKLDPAKNLPTNDVTKLIHSGTDGFIIGGTDNVQIEAVQNLYELLVETDLPIFLEISNESMILPEADHFLIPVVLNTENSKWTHGLHKELIKEMGEFIPWKRVTSEGYVILNKDAKVAHLTEAKTDLTDEDIVAYARLAENIFHLPIFYVEYSGMYGDPEVVRKASAALSNTKFWYGGGIRSKEQAAEMAKYADTIIVGNIIYEDLEKALETATIFRKKTV

SEQ ID NO: 2402 - protein, 63 aa, Listeria monocytogenes
MAKPIEEIGEEIGAKVEKVARKTGNVAGTAAKLSVYSSIWAVKTGVNKTRAFAQGFKQGWSGK

SEQ ID NO: 2403 - protein, 52 aa, Listeria monocytogenes
MGKYFVIILIALAINGISILFHNDIASLIAVIITAVLLIYLMVDLTKMYRRK

SEQ ID NO: 2404 - protein, 62 aa, Listeria monocytogenes
MKKHIVLIVVACITVIAVFMYIVQINNSELKYQNRAQIKIASQMASQNEQTDNSIVSEITYK

SEQ ID NO: 2405 - protein, 65 aa, Listeria monocytogenes
MEKFLFNATLFASALLLMVGIFKSSIPITAISLVLAVVSQHFFRKKYPKQTRSYREIVAAKQKKG

SEQ ID NO: 2406 - protein, 731 aa, Listeria monocytogenes
LNAKELVDGLNPEQRRAVESTEGPLLIMAGAGSGKTRVLTHRIAYLVRERGVNPYNILAITFTNKAAREMKSRIGNLMGGEAESIWISTFHSMCVRILRRDIDRIGYERNFTILDGSDQLSVIKGILKEKNVDPKKFEPRGILASISNAKNELITASEYIKEASGFYDKMVGEVYEKYEKKLKKNQALDFDDLIMVTIQLFERVPDVLEYYQRKFQYIHVDEYQDTNHAQYLLVKQLASRFKNLCVVGDSDQSIYGWRGADISNIMSFEKDYPNAKTILLEENYRSTKRILEAANRVIENNGNRKPKNLWTSNAEGKKIFYHKALTEKEEAAYVVMKIQEEVNNSNRPLSDFAILYRTNAQSRVMEEYFMKSNMAYTMVGGTKFYDRKEIKDILAYLRLISNNEDDISLTRIVNVPKRGVGPGTLDKLNNVATTYDLSLFEVLNRIELAGISPKISKDLVAFHDLIRGFTQMQDFLSVTELVEEILEKTGYRAMLKNERTIEAQTRLENIDEFLSVTQNFEKENDDKTLIAFLTDLALVADVDKLEEDNEEQNGAVTLMTLHSAKGLEFPVVFLVGMEEGIFPHSRAIYEEDEMEEERRLAYVGITRAEEELFLTSAYSRMLYGRPSSNQESRFIGEIPRDLLELGNENKLKADKPYAKPRIPQKTTTAYKSSGAETLGWTVGDKASHKKWGVGTVVSVKGEGSGMELDIAFPSPTGVKRLLAEFAPIEKV

SEQ ID NO: 2407 - protein, 49 aa, Listeria monocytogenes
MKKKTSLACSECGSRNYTVNVSGTQKETRLEVKKFCRHCNKHTLHRETK

SEQ ID NO: 2408 - protein, 671 aa, Listeria monocytogenes
MADKKRYEELINILDQYSYDYYVIDNPTVEDAEYDQKMQELLKIEEAHPEWVTPESPSKRVGGEVLEGFKKVAHDTPMLSLANAFNHEDLADFDRRIRDKVGDDIAYMCELKIDGLAVSLQYENGKYKQGATRGDGTIGEDITANLRTIRSIPMKLQKDYSIEVRGEAFMPKRSFQKLNEIREEEGQMLFANPRNAAAGSLRQLDTKIAASRNLDIFLYAVADFGEMGVETHSAGLDMLETLGLKVNKERRLCSSLEEVYAYIDEWTEKRADLAYDIDGIVLKLNNLEQQRQMGTTVKSPRWSIAYKFPAEEVPTKLLDIELNVGRTGVITPTAVLEPVRVAGTTVSRASLHNEDLITEKDIRIGDTVLIKKAGDIIPEVIKSITEERSGSEEPFHMPKKCPTCDSELVRLEEEVALRCINPKCPAQIKEGLIHFVSRNAMNIDGLGEKVIIQLFSQHLIKDVADLFFLSKEKLLELERMGEKSVTNLLASIEASKQNSLEKLLFGLGIRHVGAKAAKSLAVHFETMDNLKVADKETLTSINDIGEKMADSIVTYFANEEVHDLLEELKRAGVNMTYTGPKLEDMSEEELVFAGKTVVLTGKLEKLTRNDAKALIESLGGNVSGSVSKKTDVVVAGSDAGSKLAKAEELAIPIWSEEDLIEYLPDEGGLNE

SEQ ID NO: 2409 - protein, 371 aa, Listeria monocytogenes
MKKLIIAALGLTLVLSGCAPKLDSNDKVVQKDDSKAETGIMTKNQISSNYYKTVLPYKASKSRGLVVSNIYSRYDINELESGLMRVSQNKYSPDNYLFQEGQYLDKETLEKWLDRKSDKNPNGLNPASNGNGENRKPIYLAHILEQDYLKQTDKDTVALGGISIALAMNSVDYYQKEKYGDTYEQPISDSELLAQGKEMSATVLNRIRQTKGLENVPVTIAIYKQGARDAVAPGNYIAYATANGDSLSNWKDIDEKNYVLPSTESAKDHKTDNDNFLNFKKAIEDYYPNFTGVVGRGRYEDGQLAELNIDIPLQFYGEAEIIGFTQYVTDLVGQHIPKTADLQVNISTSDGPAALITRKANEDAATAHIYD

SEQ ID NO: 2410 - protein, 154 aa, Listeria monocytogenes
MDLVQFLKKGMVWVQSDIEKQEDLFQMVAESGKSEGYVTDDFLTRLTDREQTFPTGLKLDGYGVALPHTDPECVTEQFIAVITVKDGIPFKLMEDAGQTVEANLIFVLGLNEPHSQLAVLQQLMGTIQDKDNVAALLRAKDEDEVKQILETIAV

SEQ ID NO: 2411 - protein, 97 aa, Listeria monocytogenes
LSNISKETVEKVANLAKLEVSETEATAFAGQLGKIIELVEQLNTLDTTNVEPTSHAIDVSNVLREDVATKGLDRKEVLKNAPDEQDGMFKVPTIMEQ

SEQ ID NO: 2412 - protein, 483 aa, Listeria monocytogenes
LGLFDFSVKELHDKLVKKEISPFDLVSESFNRIESVEDKVGSFITLNKEAAFGVAEELGDAGIDPNNMLAGLPIGIKDNIVTKNLRTTAASKILENFDPIYDATVVSKLKNAQTINIGKLNMDEFAMGSSTETSYFHKTHNPWDLSRVPGGSSGGSASAVAAGEVLFSLGSDTGGSIRQPAAFCGVVGMKPTYGRVSRFGLIAFASSLDQIGPITKNVEDNAYLLEAISGLDANDSTSINQPVERFSDSLTGDIKGLRIGVPKEYLAEGVDPGVKQAVLDALKTLEKLGATWDEVSLPHSEYGVASYYILASSEASSNLSRFDGVRYGYRSPNATTLEELYTKTRSEGFGDEVKRRIMLGTYALSSGYYDAYYKKAQQARTLIKQDFINVFENYDVIIGPSSPTTAFKIDGMINDPITMYSNDILTVPINLAGVPAISVPCGFSDGLPVGLQIIGNYFEESLLYKVAHAFEQETTFHKEKPNL

SEQ ID NO: 2413 - protein, 476 aa, Listeria monocytogenes
MNFETVIGLEVHVELKTNSKIFSSAPAHFGAEPNTNTTVVDLGMPGVLPVLNKRAVEFGMKAAMAINCEIAEHTKFDRKNYFYPDNPKAYQISQFDKPIGEHGWIEIEVGGKKKKIGITRLHLEEDAGKNTHTSHGYSLVDINRQGTPLIEIVSEPDIRSAEEAYAYLEKLKSIIQYTGVSDVKMEEGSMRCDANISIRPIGQEEFGVKTELKNLNSFNNVRKGIEYEEKRQAEVLKSGGIIEQETRRFEEATGKTSLMRIKEGSDDYRYFPEPDLVDLFIDDAWKERIRAEIPELPDKRQIRYINDLGLPAYDAMVLTLTKEMSDFFEATLVAGADAKQASNWLMGEVSAYLNAEQKELHETGLTPENLAGMIKLIEAGTISSKIAKKVFRELAQNGGDAEQVVKDKGLVQISDEGALRTIISEILDNNEQSIVDFKNGKDRAVGFLVGQVMKATKGQANPPMVNKLLLEEMNKR

SEQ ID NO: 2414 - protein, 310 aa, Listeria monocytogenes
MQKHARVIYNPTSGREIIKKNLADVLSILEQAGYVTSAHATTAEPDDAKHAAEEAVRNRFDLVVAAGGDGTINEVINGIAEKEYRPKVGIIPTGTTNDFARALHVPRDVIKATKIIAAGQSVAMDIGKANETYFINIGGGGRLTELTYDVPSRLKTMLGQLAYYLKGIEMLPSLKATKVKVEYDQGVFEGEVMFFLLGLTNSIGGFEKIAPDAKLDDGKFSLIIVKKVNLAEFIRLVTLALRGDHIKEPNVIYVKSEKVIVNSEDKMLINLDGELGGETPMEFRNLRQHIEFFASVDDIPATDLFIKENS

SEQ ID NO: 2415 - protein, 251 aa, Listeria monocytogenes
MTSGHQFKRFTMIIIVLIIAIAAAVFFFWQVDAEEQAPKVSKTELIESNKVWINNQMQIPIQDKIILSIPATNTNTTIASNGDLILETTNEEILKELASSDNRYKDIKAYRLRIEAKKVSEYITNTKYRYPTTTIQKKFANYEITSGERSVQTEKTPVQIEETTNNDIKVSLNTSYSSDDAEVAADIFNSQIPEETTITDNTKNLITNKNVTIYPKTFVYDFTLQKNTMLVFKEQEEAVIKEPIGIEYIIK

SEQ ID NO: 2416 - protein, 453 aa, Listeria monocytogenes
LEASLLKKNQSIELTIEDLTHDGSGVGKIDGYPFFIPNTLPGEKVTAKIIKLNKNYGFARMENIETVSANRVEPPCAVYSKCGGCSLQHLSYDGQLEFKRNQVEETMKRIGKLNVEVPETLGMENPWRYRNKSQVPVGFVNGKLTAGFYQKRSHAIIDMSTCLIHNEQGDFAVQKTREILAKYGTEPYDEQTGKGDIRHIMTRFAHTTGQLMIVLVTTKERMPFKEEIVRDLVEQLELTSIVQNINPHKTNVIFGDRTKTLWGKDIIEDTIHGIRFAISARSFYQVNPLQTEVLYQQAIDAAELTGEETVIDAYCGIGSISLCLAKKAKHVYGVEIVDQAIQDARANAELNELANTTFETGKAEEVIPSWYKAGIVADVLVVDPPRKGCDEKLLETILAMKPKKVVYVSCNPGTLARDMKILTDGGYVAKKVQPVDMFPMTTHIEAVTVLHLN

SEQ ID NO: 2417 - protein, 184 aa, Listeria monocytogenes
MAITMYIDQPGATLNRETTHPHFNEHFKASFYLDEQDSYGPFGYEDGLEVLRRLEEYFSDKSDQGLNLSSFPKYMMETVKKASYVPAKDDDVERLKQLLVEFGSDVRASDRITVSAALAQIKITGYVLPALRDAALESLHREIELNKIENIDAGYADSMFYDLLTFTKDYTSVLPGMWCRHCTE

SEQ ID NO: 2418 - protein, 157 aa, Listeria monocytogenes
MGAGKTTVGNILANLADLPYIDIDEVITSEQGMSVSDIFAKYGEKEFRRLEHEKLKELATTKAVIATGGGIVLNPENREVLKNTYPVIYLETDPEVFMNRLKGDTTRPLVQQKTAEEIRAIFEPRIAHYQDSADFIVNTDNRNQQEVAQTILTMLDK

SEQ ID NO: 2419 - protein, 689 aa, Listeria monocytogenes
MYLDERSNSLLKELLRHPDTSSTNLQAKFGLTRRQVDYSFQKINNWLEEQTYPKIHRAANGRFIVEPDLFQIIGEEDGEKTDWYIPSEKERASLIILMLTTGSEELSLNHFISELEVSKNTVLRDLKLVQKTLDKFNLEVKYSRMRGYLIDGDEWNQRTALIYAAEHIIESFGGEEYLQDFMQVDEARIKELREKLEQVEHHLNLHFIDNKMQILPYILEAVFRRMKKGQTITTSFLIDYNELSDTREYGAAEIFIEEEPNMPEAERMYITLQLLTSNVLPKQYLKSEETHKLRLALEQVLSEFEKKACIQLVDKESLLEKLFAHIKPAYYRIKYHLTTDYSILDKIDQEFQAVHYIVKESLAPLERFIGSKVPENESIFITLFIGGHLIESTEKLQTRLKAVVVCPNGLSISRLMEKTLRSLFPEIFFYQAMSIREFEQTKLGYDIVFSAVPLSTDKKFFLINQLMDGKERLELRRRVMRSVYLVDEVNISVDQLMKTISKFADIKDAARLEKVLADYLMPVPEENTSKHEGKSSLADLLEVTRITRKKSVKDWHEAIYHAALPLLSAGVVEPAYVEEMKRQYPAPIMNIILRNTIAIPHAETEKGVNSLGMSLLYLEEGLPLEGGKELHFIVVIAAIDKNAHFTALLQLMELSENKKELKKLADAANTEEMHQIIKNFTDLETKKTM

SEQ ID NO: 2420 - protein, 372 aa, Listeria monocytogenes
MLTNFIEKDIKRKCLICDFILKNKHTNLDEIAEYMGTSRVTVRSDIHALNEELDGLILIQMKECADNWVYQCQLQNGVTERKVLYKLYDNSMFLKCVAFFVTNVEENKFTDFMDTYFISHSHAYRLKHKVEEFLREIDLKLDNNRITGKEYRVRYLIALLQAEYGVLIYPLLDEEKQMIDNFMATLNLLINIDTLAHNAEGHAYFRSLISMVFKRDIPTSAIILDEQCQKYIESSRFLDIVQKSSKETLEKELGQEFSYNDYLYLMLIYYSTNFSIIDASMKKVELEQFDELIMKNADLQSLVDLFEEYFGAEVVNHSLFRAALCYFLKKTLFNLQGLIPSNERLLDKKYQPLYLVVKNVLKRWNENSGRRV

SEQ ID NO: 2421 - protein, 79 aa, Listeria monocytogenes
VHEKMFNSVEDLNRLLEESDEPTIVLCNPNCELELKEAVEGTIIPISLAFFDRDLEDVEEVIQSLRIKEHEKRLAYLRG

SEQ ID NO: 2422 - protein, 464 aa, Listeria monocytogenes
MLYSKENKESYLEPVFGSSAEDRDIPKYTLGKEPLEPRIAYRLVKDELLDEGSARQNLATFCQTYMEDEATKLMSETLEKNAIDKSEYPRTAELENRCVNIIADLWHAPKDQKFMGTSTIGSSEACMLGGMAMKFAWRKRAEKLGLDIYAKKPNLVISSGYQVCWEKFCVYWDIDMRVVPMDKEHMQLNTDQVLDYVDEYTIGVVGILGITYTGRYDDIYALNEKLEEYNSKTDYKVYIHVDAASGGFFTPFVEPDIIWDFRLKNVISINTSGHKYGLVYPGIGWVLWKDESYLPEELIFKVSYLGGEMPTMQINFSRSASHIIGQYYNFLRYGFEGYRTIHQKTSDVAQYLAHAVEQTGYFDIFNDGSHLPIVCYKLKDDANVNWTLYDLADRLQMRGWQVPAYPLPKSLENIIIQRYVCRADLGFNMAEEFIQDFQASIQELNNAHILFHDTQQSGVHGFTH

SEQ ID NO: 2423 - protein, 507 aa, Listeria monocytogenes
MSKQAKSLTLFGFFAITASMVMTVYEYPTFATSGFHLVFFLLLGGFLWFLPVALCAAEMATVDGWQEGGIFSWVGNTLGERFGFAAIFFQWFQITVGFVTMIYFILGALSYVFDFPALESNPFIKFIGVLVIFWGLTFSQLGGTKNTAKIAKFGFIIGILIPAIILFILGIAYVAGGNPLHVTFSKEAFIPDFSKASTLVIFVSFILAYMGVEASASHVNEMTNPKRDYPLAMIMLVILAIALNTIGGLTISAVLPLKDLSLSSGVVQTFQALILHFGSGLGWAVKLIAIMIALGVMGEVSAWVVGPSRGMYTAAEQGLLPEKMKKVNKHGVPVPLIMVQGVVVTIWAAILTFGGGGNNLSFLTAISLTVVIYLVGYLLFFIGYLVLIFKKSSLKRTYQIPGGKIVKVIVALIGLVTSIFALCISFVPPASIAAKSDTTYMVILSISFIVTVLIPFIIYAVHDKKDITPKDITHLDSSDINKFTHPRARGEHIINPDEKHIMNQDKL

SEQ ID NO: 2424 - protein, 156 aa, Listeria monocytogenes
MKLSKSMDQVFCIMTMLYTQKVDVPISSVTIHHRLRDSSPSYISKILRKLVVSGLINSVSGNNGGFTLAKDPEEINLLDIVEAVEGKIDTYPDSDLIHTVFSDYHEFAESGIHTITSAFRNADKEYANYLYSQKLSVLVEQVIGKERTTIIDWNEA

SEQ ID NO: 2425 - protein, 927 aa, Listeria monocytogenes
MDMVKNEWKKLFKNKILLLSFVVILFIPLLYASFFLKSVWDPYGKTGDLPVAVVNNDKPVDYNGQTMDVGDQLVTKLKSNKELDWNFLSKEEAEQGLKDGKYYMIVTIPKDFSKNAASVLDKDPKKMELSYKTNGSLNYLGQVVSEQGAKQLKSEVSAEVTKSYAEAIFDKIKESGDGFAQAADGSGKIKDGLVKSQEGNKTISTNLKTLADSSLTFKDGANTLEVGLKTYTDGVNTAAAGGDKLNAGVSTLAAGVGPLKDGVAALDGGATKLASGVSTYTSGVDTLAGGINQAYTGSTALSDGLNKMNGSVPTLASGITQLNNGQKSLATGLDSLVDGSNKLSAGLKELDGNLTDKQGKIAQLKQGMNDLQQGIDQLNQSVNGEDAALAKQLATLQKSLSDLQNGLTFIKSNANFDAEAIKSKINATAGVSAEDKQKIIDAIQADLDKETQKSATQVATVEQLQSGLSGLDLAAIQTQVTELQTGVAKISAGYQAVHGGTNEAFNSIHQAINGSGSQTLLGGANQLTAGLKSAQAGSAKLVAGTNQLNSQVPTLTSGVGQLAAGSASMENGLSKLNDGGNKLASNSGALRSGATELQGGTNQLAAKVPTLAGGVNQLQAGSNQLAGGLNQLSANSPKLVSGVGQLADGSSKIADGSSKLANGSFQLGDGLTKLTDGSTELTDKLADGAQQVKDTKATDKTFNMIAAPTKLAHNEYTHVSNYGHALAPYVLSLALYVGALVFNFIMPIRRVSMEGQPAYKWWLSKLSLGFVAAVAMALLEGGIMIALGLRPDSIVEFFGTAIITALAYMFLIMLLAMTFDNPGRFIAMVLLIVQLAGSGGTFPMPLTGWFFNLIHPFLPMTYSIYAFRESLAAGMGPNVYSMSMLILTIIMVACVGLLYLSMSHLKKRHDAHESALDDNQKLMALEN

SEQ ID NO: 2426 - protein, 281 aa, Listeria monocytogenes
MTKKIVFVDVDGTLVNDDGLVPESARTAIIKARNNGHQVYLCTGRSKPELYESIISIGFDGIIGAGGGYIEVDDEIIYHKKVANEDVVHMVDFFTEKQLDFYLESNGGLFASPNLESHLDRLVYGDVENDPIAREKKANNPHPFMESLTYGETNLYRTDVNKACFLENKAVPFEEIKKEFSGKFEVMHCTVPVFGDDSGELMVPDIHKATAIEFLLKHTGGEKKATIGIGDGMNDAEMLTYCKTGIAMGNAKEELKKLADDVTKSVDEDGLYASFLKHGLL

SEQ ID NO: 2427 - protein, 243 aa, Listeria monocytogenes
MKLIRTKTYKEMSQEALEVVEQVINENDNPVINTTTGASFDGMFEGLVKGINAGEIPIEKVFLMNLDEYVAKRDASFTVYTYMHQKFYDLINKMPKRVELLDGSLADFTDEIARYKKILAENERDLQILGLGVNGHLGANEPGTPFDARLFLADSDESTIKSTIMYNNLKEDEAPSQMLTLGLADMMDAKQILVTASGERKAEAVKGLLEGPIDENCPASILRNHPNVVFIIDEAAGSLLTNH

SEQ ID NO: 2428 - protein, 176 aa, Listeria monocytogenes
MRKLYTYFVLILGVAMIGLGIYLMFNPSTSLQALTIFIGIILVLNGINEVISYFGEHKYWSISKWIMLDGILSILIGGFAIFESNMAERVFIIIFAIWILASAILRILTAFAVKGFPGWTLLLIMGIIGLIIAIISLFTNMLVAIAIGIILGIFFIFQGITCLSLWWVIRKGESRK

SEQ ID NO: 2429 - protein, 203 aa, Listeria monocytogenes
MEERFTTELMFTLTNNPKFQEVAELVYWNEEEIVHCPENNEYVYAIDEGSVTQCAARNSSWGKGSILGFTREETKIQPLSKTVAWKIPLTYVKDILKSMGKVKVADLTVIEKNFLDRNEIDCIQWFIQEMPLRLHTTSWKVALDFFRQEMMQAVPKELCAFQVKELKQQHILYELGYYLEIDVLQFHNYLRDLAYNKVLQKNN

SEQ ID NO: 2430 - protein, 413 aa, Listeria monocytogenes
MTKWLPKDLWIVIIGMVLLYTGLSFIWPFNMIYMTQELGMSTTDASLVLLINSGVGIVSSIIGGIIFDRFSGFISLTIGTIILVLSTASLCFFHGFPFFIWNLWAVGIAMGMVFSGLYAAAGLTHPTGGRTGFNAIYVAQNIGVAVGPLLAGLLAKQGMSHVYIGSFVFAIAFAGYFFFFFHKIDWKSERVSAETKHRKKGAKREFPTKLALCSFILLLLTYLLCQLPHVQWQSNLSTYMTEIKGVTSSEYGNLWSLNGALIVLGQLVLIPVVNRFKKYLLVQIYIGIFLFILSFVVAMNASVYSGFVLGMIFLTLGEMFAWPAIPTIAYQLAPKGAAGLYQGLVNGMATAARMLAPFIGAIVVQNLGGIKALFIGAFILLGCALISITLQQILQKKDQQEKAALKISVNQGE

SEQ ID NO: 2431 - protein, 532 aa, Listeria monocytogenes
MKLWKNATFYQMTAEGDQVSAVLTENGQICAVGEAMDLEKQYVANITETIDLEGKVVFPGFVDAHIHLLWYGQALERLNLNQTTTKKEALALIAERTKQIASDEWLFVEGYDENKWSDEQTLISLADLDEVSQTNPILVRRIDYHSVSINSALQEKIADFSETGFDGGGEIVRDKTGEFIGVLRDNATTMAIDSFPAATPSELSAWLEIAITDLWSKGITGAHSEDLHYFTGFASTLAAFRNTIGSNKMPFRAHLLVHHAELAAFSASNESFVSGDAFLELGAMKIFYDGTVGSRTALMSAGYADNPSEKGLQIHSDQAFEDLVKAARKAGLPVAIHILGDQAFANVIRTLRANPPKEGQYDRLIHTPWLTEALIEEATGLPVLFDIQPQFMASDLPWALEVLGDNHPPLAFAWKTLLQAGFPLAGGSDAPIEVPNPFWGIHAAVTRTANADLDGVGYWPEQALTVFEAIQLYTKGAAFASYKTTTRGQIAPGFVADFTILAEDPFQMKQAELRQVSVVMTVVNEQIVYQKK

SEQ ID NO: 2432 - protein, 270 aa, Listeria monocytogenes
MDINMFILYFFIYSVLGWAWEEVFCSISEKKLVYRGFLYGPYCPIYGFGVTAVLMMILPFQNNLWALFIFSMIICTVIEYVTATILEALFHTTWWDYHNWPLNVKGRICLPISIFWGFACIIVVRFLHPLVTEFADWILSWGGWIIPALIVVLMLIDTIKSVTSMLSFQKALAEFNEKLNAQANELKASVKERAKEFEEGLLKKQENVDMKIAEIEAKRKQDKELAASMRKLKFNERRMLKSFPKMKVKRAAPFKNLNKSLLRVDKLKRK

SEQ ID NO: 2433 - protein, 650 aa, Listeria monocytogenes
MEIFELILLMLSAVFLSNVLSRFLPSIAVPLIQVVLGIILAIPLGDHTMDLNPELFLLLFMAPILFNDGASTDKKSLWKNRKAILSLSIGLVFVTVGVLGAFIHYLIPAIPFAAAFALAAALAPTDAVAVGALAEKVRVPHKIMHILEGESLINDASGLVSFQFAVLALVTGTFSFMSAGTSFLLLSLGGIALGAILSLLKIMLMRGLRQLGIENMTSFMLMEILLPFLIFMVAEKVGVNGILAVVSGGMVHSFSYKGLNPEIAQLNLLSKNTWSVIIFSLNGLVFILLGTQLPQILMTIWQDANIQKGMLFVYIIGITFLLLGLRFLWILFFRNYEENPKVDLVSRLKNTFLYTVAGVRGTITLVSALSLPFVLGNGNAFPERDLLIFIAAGVIITTLLLANFTLPLFADKKDKVTADHTTDIVLLRDIVQQLQAYKTDENAVEMNKVLNMYNNRIFSLMEHKEVNATEKELRRLTQEWQLENTRRLVFERKIDTGVGLSHMMRLGKRLYVQTRAEKYRARMRYRQLLSHRFRDFRFVPLTFEERRKEIAKLQNENNLFVMQKLQDLDSNEYNPEIISLYLMNFERALGRGKNKKESNDEALQTTIDLASQIERETIQRYFEKGTITRKEMKVYRDNLLAIEANMQLEF

SEQ ID NO: 2434 - protein, 299 aa, Listeria monocytogenes
LEFRTIKTFYTVVNTGSFQRAAEVLNYSQPTISMRIKQLEQDLDVQLFERGKTLKLTHAGRLFYERAGQLIAQYEVLDHTIFDLKNGNAGLIKVGISEPSASLVFPKILKTFLADFPKLMVNVSVDDANTCSQKLIDGEIDFAICGEPELILENFYFPFFHDTLDLIVSESHPLASRTSVELRDLRDECFIFTPANCPIRIQIEQHLKRAIGSDYKKMELTSSMSHKYFVRENVGVSIFTSTAHSELLDGTVRIPIENLPISPPIGLLTNQKEKDFDSTTKELIDRIIYYFDDKKRQLG

SEQ ID NO: 2435 - protein, 181 aa, Listeria monocytogenes
MGKVTIIAGGIKTESRLTGLTQLAANELVTNGLEVNIIEVHKINAEALVTADFAHSDIQLANSEIESSSGVIIATPIFKAAYSGVLKAYLDLLPLKALKGKVVLPLGLGGSNGHLLALQYALDPVLKELGAETILKGQFTVDKQIERLGDGLYEIESSAKERLDIALGQFISLLNQQSVEV

SEQ ID NO: 2436 - protein, 178 aa, Listeria monocytogenes
MTEDIFRVATVDDAPEFLELLSSAFQSVKELGIDWPSTNADLAMVTENIVNSSAFVLERNGKLISTITVRFPWESSSPPSKYPFVWWFATAPELAGQGIGDKLLTYVEERVLRDTLKAPALTLGTSARKHPWLLDMYLRRGYEVYFEHEEDGDVGVMMRKILIPEKFDAALLGIPSWT

SEQ ID NO: 2437 - protein, 269 aa, Listeria monocytogenes
MKKKYGILALALTAALTLSACGGKEEPEAANQKVQTITVGTGTQFPNVCFLDENGKLTGYDVELVKEIDKRLPGYKFKFKTMDFSNLLVSLGAGKVDIVAHQMEKSKEREKKFLFNDVAYNNFPLQLTVLDSNNSINSTKDLAGKRVITSATSNGALVLKKINEEQGNNFEIAYEGQGSNDTANQLKTGRADATISTPFAVDFQNKTSAIKEKVVGDVLSNAKVYFMLGKDETKLSKKVDEALQSIIDDGTLKKLSEKWLGADYSKEQY

SEQ ID NO: 2438 - protein, 238 aa, Listeria monocytogenes
MDKAFDVKMIADFIPTLAGYLPITLYILALSLIFGFILGVLLSLPRIYKVPILDQFARVYISFFRGTPIMVQLFIVFYGIPALSSVFGIDLSQMDPLYAAIATYALSSAATIAEVIRAGVNSVDAGQAEAAYSIGLSSRQTFLRIILPQALYQALPNFGNLVIGYLKDTSLAFSIGVMDMSGRGQTLITLSNHALEVYISLSIIYYLTAVLLEYSFKWIEKRVKKENTRFTSIFDIEL

SEQ ID NO: 2439 - protein, 235 aa, Listeria monocytogenes
MPLDVPFIGTAVMAMLKTIPLTLAMTFFPILFGFIIAIGLTLIRMYHVRFLEPIAKFYVSFFRSTPAILHIMLIYLGIPLLVDFLSKSFGLGISANKIPVVVFVIIALSFTAGAYLTEILRSGIIAVDIGQMEAAYSVGYTHGQAIRKVLLPQAFMIALPNFTNLCIGFLHTTSIAAIVAVPEITGMATIVASDNYAFLEAFIGAALIYWFLTILIEAINYILEKNIAKYRGGTV

SEQ ID NO: 2440 - protein, 120 aa, Listeria monocytogenes
MSDEFAWIREEISGLKGVQYSFKEEWGAERYHVLDQLMAMRGTNKDGHPILTLKCDAEKSEQLRAENPAIVPGYYMNKRVWISVLLEEERDKDLIRALIQHAYSEAKNKLPKYKQAELFD

SEQ ID NO: 2441 - protein, 259 aa, Listeria monocytogenes
MITIKNIQKSFGENKVLKGIDLTVKKGEVVTILGPSGSGKTTFLRCLNLLERPENGEISMHDQIINCKKPSKKEVLQLRKNTAMVFQQYNLFSHKTVIQNVMEGLTVARKIPKKIAHEIAERELTKVGLADKLSAYPSQLSGGQKQRVGIARALAINPDVILFDEPTAALDPELVGEVLEVMLEIARAGATMIVVTHEMEFAKRVADQVVFMDGGLIVEQGTPDEVFNHTKEERTKRFLHRVSADYLYEIKEVKKERVI

SEQ ID NO: 2442 - protein, 331 aa, Listeria monocytogenes
MTIRFSILDQSIINPGEQPSEALRNTVELAQLAEQLGYHRFWVAEHHNSDEIAGAAPEVLLGYIAAKTSTIKLASGGIMLQHYSPYKVAEQFHVLENLAPGRISLGVGKAPGGFQPATDALQKDFVKPTRTFDAKLEELVDFVTRHSDTTIAAKPLPENKPEIFLLGGSASSAKQAAKLGISFVFAYFINGEEAVLKEARELFEQYQINTKASFQLAPIVVVAETKIAADRHIPERESIKVELADGRRVNVGSREQAEAYVKDIDQTYRFITQRIGAITGTKQEVGVEIKRLSKEYNIQDFVVLTPVKSAEIKRYSYQLLSESIKEEVVHG

SEQ ID NO: 2443 - protein, 88 aa, Listeria monocytogenes
MANVVVWSKEGCHYCKDVKDFLIEQKIVFQDIDVTDHDYLREVLQAKYGICHVPVVEIGNIENGTYQAVTEIGLEHLEKALFEKGEVK

SEQ ID NO: 2444 - protein, 440 aa, Listeria monocytogenes
MTRKETIQFGAIIHGVGGTTDGWRHPDINPAASTDLDFYKTRAKIAEQGLFSFVFIADGLFISEKSIPHFLNRFEPITILSALAESTENIGLVGTFSTSFTEPFTLARQLSSLDHISSGRAGWNLVTSPQEGAARNHSKKNLPTHSDRYTIAAEHLKVVRGLWNSWEEDAFTYNKETGEFFNPEKLHHLNHQGEYFQVEGPLNIGRSKQGEPVVFQAGASSTGRDFAAQNAEAIFTHSDSLEEAVEFYRDVKSRAEKAGRNADEVRIFPGISPIVADTLEEAEAKYTEFASLIPIENAVTYLARYFDDYDLSQFDLDAPFPDLGDIGKNAFQSTTDRIKKEAKERHLTLRQVATEAATPKTPFIGTKEQVADLIEVWFQNEAADGFIIASDIPGTFETFVEQVIPLLQSRGLYRNEYPATTLRGNLGLTIPQNKQAVETK

SEQ ID NO: 2445 - protein, 233 aa, Listeria monocytogenes
MRLDKLLSHTGFGSRKEVKPLLKSGAVVVNGTIQKDSKTQVNPDKDQITVHGTPVVYQEFVYFMLHKPQNVVSATEDNVSETVIDLLAQEDTLTDPFPVGRLDKDTEGLLIITNDGTLAHNLLSPKKHIDKTYYAKIDGDVTAEDVEAFAAGIELDDGYTCKPARLEIITPNEIKVTIQEGKFHQVKRMFAARGKSVSYLKRISMGNLQLDESLALGEYRPLTEAELAILQNK

SEQ ID NO: 2446 - protein, 414 aa, Listeria monocytogenes
TKIFFLKRSGFSFFNLQKKAFTYIINMCLKIKQKFGMEVHYIVENNKAKMNEKEEIIFNSIRKNPYISQQELADILDLSRPTVANLISGLIKKGRILGKAYILNEAKQIVCIGGANVDRKFYIKDKAQLATSNPVRSTQSAGGVARNVGENLGRLGKEVILLTACGTDSDWEAVKNASNTYMNLDYVTAFPSIATGSYTAVLENNGDLLVALADMDAYDHLTPDVLAKNEGLLSQASAIIADLNCPKETLEYLGSFAEINSIPLVLVPVSSPKMSHLPERLDHVTWLICNRDESETHLDMTIENDEDWRLAAQKWLDLGVKNVIVTNGSKGAVAANKAEGTIFEPAIVIEDIVDVTGAGDAFCSAVIYAWLEGKTLQEILKAGSVNAARTLESEYTVRQNLSTSQLQKDLEEFK

SEQ ID NO: 2447 - protein, 303 aa, Listeria monocytogenes
MKNYLSLSEEVKQAKAEGKAIVALESTIISHGMPYPQNVEMARDVEQIIRDNGAVPATIALIDGKIKIGLSDEELELFAKSSNVAKVSRRDIGYLIATKQLGATTVAATMICAELAEIGIFVTGGIGGVHRGAETTMDVSADLEELAKTNVAVVCAGAKSILDLNLTMEYLETKGVPVIGYQTDVLPAFYTRSSDVELTLRADTPEVIAESLKAKWDLQIEGGAVITNPIPEEFAMDEKVINDVIQTALKEAEENHIHGKDVTPFLLGKVKELTDGKSLEANIELVKHNALIGTQIAVAYQNI

SEQ ID NO: 2448 - protein, 147 aa, Listeria monocytogenes
MIAVSACLAGIACRYDGKDKEITKIKQMVENGEAIPFCPEVAGGLPTPRNPAEIIGGDGKDVWLGHAKVVDSKGTDVTEEYKYGAKLTLAKMQDLGITKIIMKEKSPSCGSCAIYDGTFSGKIKDGTGVAAALFQMNGIKIISEFVF

SEQ ID NO: 2449 - protein, 441 aa, Listeria monocytogenes
MQTELTFEQLENFSRKWRENPDKLVFQASIMKNGIKAATENPTSKVSIQPVFSHEVATDKVSNQQQSGRCWMFAALNTFRHKLNGTLGLKDFELSQNYTNFWDKLEKANYFLENIIETASEDEDSRLVSWLLDTPQQDGGQWDMLVSIIEKYGVVPKSAMPETFQSGKSADLNHLLNERLRTDAVILRKAFTEKKDTAGLKEEMLAEIYQLLVMTLGEPPKVFDFEYRNKDNEFKQELQITPKDFYERYVDMDLKNYIPLINAPTKDKPFNQAFTVDYLGNIVNGTPIKYLNVEMDVLKKAATDQIKDGETVWFGCDVGQLSEKTTGIMDTDIFLLNQTFGFKTAMTKAERLDYKHSMLTHAMVLTGVNVANGEVNRWKVENSWGEKIGNNGYFVASDAWMDEFTFQVVVHKKYLSKELIEAFNQEPIALKPWDPMGSLAL

SEQ ID NO: 2450 - protein, 122 aa, Listeria monocytogenes
MINEFVCTNISTQDPAALVAFYHEKLGIPIVFEGYDNYDGAKLGFSEKAPGIIVWNNSKWGEASESKVEFVFSCDTNLDEMYRELQTAGVETPEPCVAEWGGRELNLLDPDGNKIMILEPAQ

SEQ ID NO: 2451 - protein, 250 aa, Listeria monocytogenes
MLNAERKQLIMESIEKLGVIKLQELVEGLATSESTIRRDLIELEEQGLIQRVHGGAKLVKLHNQEPSMNEKSFKNIQSKKVIAAYCASLVEENDCIYLDAGSTTLELITHLANRNITVVTNGLTHIEELVRQNIDAYLLGGKMKVHTKAIIGAVALDNIKNYHFDKAFIGTNAMHPEHGYTTPDMEEAFVKRAAKERADRVFVVADHTKFNEVNFSKMFSIEEATIVTDYIPSAVKESFIQKTKIIEVEK

SEQ ID NO: 2452 - protein, 307 aa, Listeria monocytogenes
MIYTITLNPSIDYIVQIDQLNLGGLNRMKQDYKLPGGKGINVSRVLNQLNVPSLATGFLGGFTGSFIKDWLQNEGVKTGFVTVKDDTRINIKLKHGEETEINGLGPAISEKEINEFLKVMDKVTANDIVILSGSVPPSLGNDFYNKIIQICKEKKAEFMIDTTGQELLDALPNRPILIKPNHHELADLFGVKLGSVEELIPYGKKCLELGAQHVIVSMAGDGALLFTGEDVYFADALKGELKNSVGAGDSMIAGFVGTFDKTRDPVKAFAAGVATGGATAFSTDLAQKELIDELLPQVKITKITGRN

SEQ ID NO: 2453 - protein, 632 aa, Listeria monocytogenes
MRITDLLSKDVMIMSLQATTKEAAIDEMIASLKSNGKINDEVLFKKAIMNREAQSSTGVGEGIAMPHAKTKAVNEPTVVFAKSEKGLDYDALDGQPAHLFFMIAAPDGANATHLETLAALSRLLVHPAFVQSLRDAKTPEEVINLFNNEQEDSEETVVAPTSTNDTGKSVVAVTACPTGIAHTYMAAEKLQETANKLGVRIKVETNGSRGVENRLTDKEIAEADGVIIAADVQVDMPRFDGKHLIAKPVAAGIHKPEELIKEAISGNAPIYKAEEGSQATESADGLSIGQQIYKHLMSGVSHMLPFVIGGGIAIAIAFMLDQMLGVPQDQLAKLGSYNEIPALLKQIGDVAFGFMLPVFAGYIAYSISDRPGLVAGFVAGGVASVGGAGFLGALVGGFLAGYAVELIKLALKKLPKTLDGIKVVLFYPVLSVLIVGLLMLLLNVPMSALNTWLNDFLNSLSGTNAVILGLLLGAMMAADLGGPINKAAYIFATGTLAASVATGGSAIMAATMAAGMVPPLATFVATLIFRNKFTAQERDAGLTNSILGASFITEGAIPFAAADPLRMIPSFIAGSAITGAIVMFLNIKVLAPHGGVFVIFLVSQPWFYIIAIIIGTLISAGLIGVLRKKPTV

SEQ ID NO: 2454 - protein, 115 aa, Listeria monocytogenes
LEFGEKLIHLRKKNRLTQKQLAAKIGTTASTISKYENDNHRPPIFILAKLAEILGTTTDFLLDDVAGLREKNSVNAFPLIGNPELEKWYLELPYTYSEDELLMLKRIADAIENKK

SEQ ID NO: 2455 - protein, 158 aa, Listeria monocytogenes
MALVACLFRLFSSSFPLVGRKEGTKHLIGVTHKPPIIIDPVTSTYVFPTVAPSSTECIWIFPQHIKDYHAIGFNHTLITFSNMETFEIDMSLASFNNQIARTSMLHMKFSQKMRIMESNFPSMNRFFPPTTLAAEPRRYYSTMLPNNEEPNDPQDPEQ

SEQ ID NO: 2456 - protein, 452 aa, Listeria monocytogenes
MKAAIYIRVSTQEQIENYSIQAQTEKLTALCRSKDWDVYDIFIDGGYSGSNMNRPALNEMLSKLHEIDAVVVYRLDRLSRSQRDTITLIEEYFLKNNVEFVSLSETLDTSSPFGRAMIGILSVFAQLERETIRDRMVMGKIKRIEAGLPLTTAKGRTFGYDVIDTKLYINEEEAKQLQMIYDIFEEEKSITSLQKRLKKLGFKVKSYSSYNNWLTNDLYCGYVSYADKVHTKGVHEPIISEEQFYRVQEIFSRMGKNPNMNRDSASLLNNLVVCSKCGLGFVHRRKDTVSRGKKYHYRYYSCKTYKHTHELEKCGNKIWRADKLEELIIDRVNNYSFASRNVDKEDELDNLNEKLKTEHTKKKRLFDLYISGSYEVSELDAMMADIDAQINYYEAQIEANEELKKNKKIQENLADLATVDFDSLEFREKQLYLKSLINKIYIDGEQVTIEWL

SEQ ID NO: 2457 - protein, 226 aa, Listeria monocytogenes
MKKGIALLAGFMLAFSIFLTGCGGTDNTRKENHSDGSAEVKNKKDNNTSDEYVEDGLLLKVGEWTKDKDYDTKVTLEKIATPKIKVGLGDLNMLIKDVKIFKRENVSDAEKEEFSGGKVPVTDPYYTIQVKYDLENTGKNVLNFNGIDYIITDQKQQIDVMTDNIGINGVFTVQPDVIVEDEYVICILKKDNVDKINKVTIKTSPVYNSETYDEITKSMTINIEFK

SEQ ID NO: 2458 - protein, 233 aa, Listeria monocytogenes
MSKYSYLLKKWWFWILLLLIILSLFNGIWVLLFFATLATLTFAIIKVIKNENRRKYTLIIIATTVLLLTFSLIRTVQLYNYIVENPEENVTIDNQKKDTKEDAETDEVEETEETDQADASAAYTVTQEGIESFNESINRLISESNGILIKVVPFENEYDMLIAYVTQDLKYQDETIKQKNADYLGNEIQQRALGTLFGGDSNHRPMVELRYEDETKMAGSSAFDKTNMKLTGK

SEQ ID NO: 2459 - protein, 326 aa, Listeria monocytogenes
MQLHAMWDEYPALSKDLQEVLQTIEKNIQIRDKHVEQNVKDLIHAGGKLLRPAFALLSAQAGPDYDKDRAVSIAAALEVLHMATLIHDDVVDDSPLRRGIPTIHSKYGRNYAVYTGDYLFCICFKILSAHASSVENIEFNSKNIEKILMGELDQMRTSYKMNVTVREYLTRISGKTAQLFALSCYSGATGSKATRMTVAKCYNIGHYLGMAFQIIDDVLDYTSTDEGLGKPVLNDMKQGIYSLPLIYAMKGHLAEFEPLLSQKLDMTDEASEQVLALISKYKGVEQAFKLAKKYTNKALREIKKLPAGAYREDMYRLTKNILDRDI

SEQ ID NO: 2460 - protein, 158 aa, Listeria monocytogenes
MFGDILMKLRKNKNLTQSDIAKILGVARTTYSSYEQNRRMPDAEIQIKIADYFDVSLDYLHGRGKNNIADTIAAHIDSNASEEDIKEILAYIEEKRKEHVNEEEINITDAASKGDKEVNEFVDENEDFKAVAARIMSDAEAVKAVKSFIEFYEQQKNN

SEQ ID NO: 2461 - protein, 94 aa, Listeria monocytogenes
MNRRYLSNKRSEQKDCVFKTKDIPPENLKSLNIKMQGDRNCCYGVLEINGKQLRKGITAVKLDLKAGSLPVVQVEYHPFTISEEMQRLIWSGKY

SEQ ID NO: 2462 - protein, 93 aa, Listeria monocytogenes
MNNIKQAIIKLETILENGNAIESGSFVKYSVIKNILSLLEKDQELKIIEMKVELNGVEDSIENATLLEKRLIEAKSLVEDLASTINSLEIKVK

SEQ ID NO: 2463 - protein, 258 aa, Listeria monocytogenes
MSNLQVIANEMLPVLENEQGEKFVDARMLHEKLLVNTRFNDWIYRMIGNYGYENGLDFYSTLSKTNGRPSTNYFLTLDTAKELAMVQNNEMGRAIRKYFIEVEKQARKLATEYPAFSYMIEDPVARAKKWIEEQQEKQEVLKKLEEQKPKVVFAEAVQTSENTILVKDLATILKQKGLDIGQNRLFEWLRGSGYLLSKGAYYNKPSQKAMNLGLFEQKTHIHTDRNGLMKTTYTPQVTGKGQVYLLNKLLEEHNQVII

SEQ ID NO: 2464 - protein, 177 aa, Listeria monocytogenes
MFQKSTSATAAMQVLAETRTQKELAIDSYVTPALISNQIKGKRTVSLEQAEQLIDSYNEPRSTYLFAHEFSNGMIPPLFDGLDNHHASLTNRFELEVEEAMNTLKNGLETMTFNLRKGDMLQREAAKQAISEITDVVASALTLNASIAIAFNIDLQQVLNKRDLYYQKSGLVRSCGK

SEQ ID NO: 2465 - protein, 158 aa, Listeria monocytogenes
MKLYELTQAYNQVLEMAEELDTETLQDTLDSIREPIEEKAENIIKMVKSIDAEAEGLAKEVERLTKRKTALDAKAKNMKEYLESEMLKVDIRKIKSSLFTISIQKNPPSLRLEDEEKLFMFLVEQPKKLDKKAITSALKEGRDVPGAKLVQTESLRVR

SEQ ID NO: 2466 - protein, 268 aa, Listeria monocytogenes
MAKLETFYPIVATPKRAGYKEYLPSAALTGYIRCFWEADDKNFPGNNLVVPDLCADIIFTIDSKTGLVTDAIFVGVSDASFESDDESNTELFAVRFYAWSLFLFVEQDLTGSMNRVKEPEEMFAGFVSFFQERFAEMTTNSERIALLEEFLLRKLMMLGKQVHPDFLNSIDKLLQNPNQFVLGAVSVRQLERLFQKHMGLAPKQTAKLIRFQKVLQALYENPSVPGAELAYLHGFTDQAHLIKQFKRYSNHTPEEMKQIFLQNVANIQ

SEQ ID NO: 2467 - protein, 232 aa, Listeria monocytogenes
MKKSESIGAIAKAMAAIQKEVKPLEKSAANPFTDSKYTPLDKIVEAIFKVAPGHGVSFTQWPISGDNGTIGIGTMLMHESGEWIEYDPLYMTVITNKKMSSAQEAGGTITYAKRYVIAAVFGIVSDEDKDGNIQSSPSKYPKNNSYKSNNYNQNSNSQQQTKQSQQNDNLASPAQRKAIFAKASVIGEPFGHDGTFVLESYKITDTKSMSKGEASALIKKLDAEIEAQKQVN

SEQ ID NO: 2468 - protein, 324 aa, Listeria monocytogenes
MSGIQWIKLSVNMFDDEKIKLLEKMPEGNQMLIVWIRLLALAGKTNDKGRIYLNENVPYTEDMLATLFNRDVGIIRVTLHTLQSFGMIQKTENGLIEIENWEKHQNVDGMERVREQTRKRVEKHREAMRQNRIASGDSKGNKECNVTSSVTVTQSNAIDIDKELDKDINNNNSDLNFKDFWEQNGFGMMLPVELEKLLAWVDDFAGNREIVMKALEVTSEQGANKRNYAYVNKILKNWESRGFKTIADVDAAEKQRQIELEQKYNKPTYNKYNKPVKEEVLPDWFDKDQKQTKQETSTTGSSEDLEKQVAEIKAQLAARNEVQA

SEQ ID NO: 2469 - protein, 270 aa, Listeria monocytogenes
VKRILNYPGSKWGLADLIIENMPEHKSYLEPFCGSCAVFMNKQKATLETINDLDGRLVNLFKAMRDNPEKLQYLIMHTLYSREEYMLSQEITSDSLEDARRMAVRLWFAVGGKTNANVGFRKNVSWNGPYNAYEWNDMYNRIGIAAARLKDAQIENVDAIKLIEQHNDKDTLIYCDPPYVATSLASSHYQHDFSLEQHKELLKVLKNHDGKVMLSGYESELYKQELSDWPVLKTMTKVGITSEKKSDRQEIIWCNFEPPMQLNLFKEEKA

SEQ ID NO: 2470 - protein, 198 aa, Listeria monocytogenes
MRFKEGDKVQFIENNELIIGTIKRVNNDVGWVDLKVSDLSWFFRKLEDVVKVKEPELIAVPRFAADWIKHCKQREYDLACLLDYEDSDMSAEMYEWLISSADNQELLARAWLDGYEVEKEPLYYVRLPLSTWNDDAAELEVINMYVLLNVQSDETSITGSIINENKEWRTKLTEAEIKGIPGGEIYWQFAVLVEEAEA

SEQ ID NO: 2471 - protein, 147 aa, Listeria monocytogenes
MRAIGFRAFVKRKKKMLPVTDLCFNETEAVGVSGCGNAKCTLCVDWYSFDDVVLMQYTGLKDKNGKKIFEGDVVTAFSNINKYTDSFAGDVEPTFCFTSIVYDGACFKTTYKGEPSYVLNQNGSSLVKHMEVIGNIHENPELLEGTE

SEQ ID NO: 2472 - protein, 156 aa, Listeria monocytogenes
MKQEELDIILENHGKWLFNEGGDRADLSNADLKNTNLRFANLRLADLRGADLSYANLRFANLSNADLSYANLSNVNLNWVNWQHVEGLTVICVQVDTTRKNNQIAYIKELDIWITGCFQGTLDELKASVEQTHGDNEKLRKRYYRVIDFILKEVAE

SEQ ID NO: 2473 - protein, 156 aa, Listeria monocytogenes
MSAYKRILVGVDGSNEAEAALRRAVQFAKMDGATLGIGFVADVRRIAPLIDYEQTYAKKAKAYGEELVEMYKKEAEKAGVAHVETFVHFGTPKTTFNKKITRNFEPDLILVGATGLSATEQFILGSVSEYTATHAPCDVIIVHAKPWRNRKTVEKL

SEQ ID NO: 2474 - protein, 153 aa, Listeria monocytogenes
MKHGQWMLNGTDGERWGAFERFDTKEEAIIYGVELLTEYNSLDDDERRDYDLSDGLNMRPLDYENIYTFFVGQIEEVEFPTEVDTLLENIAQCVYDEVGECGEEYLNDVTQEHKEQLSDLIYEWAKQRDYLPACFKIEMVEEIDIRSFEEVAE

SEQ ID NO: 2475 - protein, 160 aa, Listeria monocytogenes
MMNRVVLVGRLTKDPDLRYTPAGVAVATFTLAVNRTFTNQNGEREADFINCVVWRKPAENVANFLKKGSMAGVDGRVQTRNYEDNDGKRVFVTEVVAESVQFLEPKNNNVEGATSNNYQNKANYSNNNQTSSYRADTSQKSDSFASEGKPIDINEDDLPF

SEQ ID NO: 2476 - protein, 134 aa, Listeria monocytogenes
LRQSIPRSSLTRRTSTRSKYNAKKVVIDNIKFDSKAEAAYYQQLKLLKMSGEVVSFDLQPEFVLQESFRKNGKLYRAIKYKADFLVRYSDGHEELIDIKGMLTKEFRIKQKLFELRYMQSIKCLKLKGRNFVEV

SEQ ID NO: 2477 - protein, 127 aa, Listeria monocytogenes
MTVMEITKSKARQREIISYIANNDVELDELLKLQKELNQLMNENTIEKQKTYWTKTFDRIVKKKKWAEITIREFADLRNAGLTCYAIAEHFKVSKAVVFNYTQRNKKEYYQIFDMNEYQKNKEIWND

SEQ ID NO: 2478 - protein, 144 aa, Listeria monocytogenes
MGQLFNLPQVEDINYIQTVRAVRKFFKDYLMLRVMAGSRKLPTMTTTYKLTPPNFSNEFHSKVEDAAIHNVDNVHAAQEAVKKYDAILNQLEHIHRKILFEKFIHNLQDITIMLDIPYEERQYKREKRKAVIELATTLGIEVLN

SEQ ID NO: 2479 - protein, 179 aa, Listeria monocytogenes
MSFILEVGSLADWVSGLATVGALFWAIKLNSNENRKRLTILFRHSFVSKKNGIIISDGKPKVFIITPVNNSKFSLEINFRQILLVPSLMDRLLFRAEPKKLSNIEALLKQLENKANWQIIKPNLSGEPIMFDYEFIVKQIKKYADGKRFNFAIEIQFIDSTSKIFKHKEKLELRKIKGL

SEQ ID NO: 2480 - protein, 264 aa, Listeria monocytogenes
VKTEEKYKIFAKTYVMNGFNGKEAAISAGYSTKTAEQQASRLLRNVKVLELIDEEMKLLSKRMQDDASKIYAELWKQVRMIDDKMAKHEEASRKLSITDARKITAIADINNLKAKIRRTESKIKKMDGRKADEGKFKKELLEEYDELKIQLEELEDSVSEIYEENSTSKRDLLWHKDWKEILSLRAQILQDLFDRSGYKETKDMQDRRVALLDAQINKLELEAKKDCKDSGFATIIMSNVDEMQAYLDKKAGGTDERDDTQTTN

SEQ ID NO: 2481 - protein, 151 aa, Listeria monocytogenes
MTVSKVAIASDHGGIELRKSIISYLESVGISYEEFGPETPESVDYPRLAITVSEKVVNQEVDRGILVCGTGIGMSIAANKVKGIRCALVGDTFSAHATREHNDTNVLALGARVIGPGLAEDIVKIWLETEYEGGRHANRVGQITAYEDSHA

SEQ ID NO: 2482 - protein, 443 aa, Listeria monocytogenes
MNATIHKQLIDYQVINVTDMINPAFYDLWLSKHNHIIAKGGRSSMKSSVISLKLVEKKMANPQSNMVCLRKVANTLYKSVYQQIKWALYEMGVADQFKFGKSPMEIIHKEWGTGFYFSGCDDPAKLKSMKIPVGYVSDLWFEELAEFSGVTDIDVVEDTFIREDLPDGQEVTIYMSFNPPRNPYEWVNEYVDSKRSDDDYLIHHTTYLDDEKGFLSKQIIKKIEKYKKNDLDYYRWMYLGEVIGLGDNVYNMNLFQPLKAIPADDRLILIDFAIDTGHQVSATTYLSFGLTAKRNVILLNTYYYSPANQVVKKAPSEYSKELRDFMTKVVGNYNTNVDMQTVDSAEGGLRNQYYKDYGVSLHPVAKGKKVDMIDFVCDLLAQGRFYYLDIPENQIFIEEHRKYQWDVKTVNTDKPEVIKEDDHTCDAFQYYVKDNLRKLGLKY

SEQ ID NO: 2483 - protein, 586 aa, Listeria monocytogenes
LINQIIASVKGVMRRMGLLKALKDVKDHKKVNANDEDYKYIDMWKRLYQGHYAEWHNLNYEHNGNPVNRRQLSMNLPKVTAKYMSKLLFNEKVKINIDDKAAEEFVLNVLKTNGFTKNMERYIEYGEAMGGFVIKVYHDGKKNVKVSFATADCMYPLSNDSENVDECVIANSFHKNDKYYTLLEWNEWQDDIYTVTTELYQSDDPDELGGKVSLKLLFNDIEPVVPLPKFTRPTFIYIKPNIANNKNLTSPLGISVYANALDTLKTLDLMFDSFYQEFKLGKKKVLVPSSFVKTAIGLDGSTTQYFDSTDEAFFLYQGDQDADGKSVKDISVEIRSTEFIESINAMLRIYAMQVGLSAGTFTFDENGLKTATEVVSEKSETYQTKNSHSQLIEQGIKEMIVSILEVGKFIEAYSGEVVELDTITVDFDDSIAQDEDTTINRYTTAKNQGMIPLKIALQRAWNITDAEAEAWKEEIEKDVQAEIPGNDLSGLLGDIELPDENANGTLEASAVAGETIQEVSLNGAQITSLVNIVQSVAKGELPYNSALEMIVAAFPFDEEKARKILADAGNGFVITEKEKTSKKEVD

SEQ ID NO: 2484 - protein, 379 aa, Listeria monocytogenes
MALTPRQLDLFVQPVVDVYTGLENELFTLIVRRLKTKKNISADNVLAWQIEKLNQVHALDQQMLNKISKASGVSAKKLFSIVKDAGYSDLKQVDNYFSKLAEAGAVLPLVGDGQTIVDKVMRSYFKLAESNYNRVNQTMLSQARQIYSDIIHETTQSVLAGLKTHRQALAETVTKFAENGVPALVDKANKRWTPEAYVRTVTRTTVNSVYNSVEDERMNEYDVDLVRISQHVGARPTCSLVQGKVICLLSVEETKTKYGNKYMSIYSPELRYGYGDGVFGCNCRHHRFPFVEGINVAPEDSELIDEEENKRVYMLSQQQRLMERDIRASKRKLSAAEELGDELAVKKAKQAVRTKQSKLRAFVNTHKLTRQYSREQVYA

SEQ ID NO: 2485 - protein, 196 aa, Listeria monocytogenes
MQREYLKGLGLEDEVINKVMAENGKDVTAAKQQLSEVEAERDGLKSQLTQRDKDIDDLKKNSGTGEELKKQIEDLQQKNKDLESDYQSEIAETKKNSAIELALAGAKARNPKAVKALLDNDKLELTDEGLKGLDEQLGALQESDAYLFAQESEKVPKFGFSGNPKAPAGYDGSLKENLKSDSFNLTKFLTEKGESE

SEQ ID NO: 2486 - protein, 333 aa, Listeria monocytogenes
MGNEITKLLDVVTPEVFNAYMDNFTSEKSAIIQSGIAVADPSVAQNITAGGLLVNMPFWNDLDGEDETLGDGEKGLETGKITASADIAAVMYRGRGWSVNELAAVISGDDPLNALMGKIASWWMRREQTVLISVLNGLFAKNGALASSHLLSKPTSAISGNLVLDAKQLLGDSADRLNLMVMHSAVYTALQKQNLIAFIPNARGEVNIPTYLGYRVVVDDGVPSTGTGAAKVYTSYLFATGSIGRNTGNPAKLTTFETARDASKGNDQVFTRRAFTMHPYGVKFKNAVRDANEITPTNADLAKAGNWEKVYEDKQIGIVGIQHLVEELPAGGA

SEQ ID NO: 2487 - protein, 131 aa, Listeria monocytogenes
MPYTTLEFYTNEYAGEHLEQDEFDKLLKHAERKIDSVTFYRIRKSGIESFSEFIQHQIQLATCNQIEYFKEAGGTSELAVSKPDNVSIGRTSISDSNFASTATSLNSGLIGSDVRTYLAPTGLLYSGVGVR

SEQ ID NO: 2488 - protein, 120 aa, Listeria monocytogenes
MKVAKPITNAPPLPLDWLIHNISYEAYKEEDRHNQVVYEKGIEIEHVRVDFSKSNQIAGLSDSDRYDAVIFIDAVNSMNMPNDFISRSRIFFSGKAYKIVKVIPCYATSNSVYHWEIEVV

SEQ ID NO: 2489 - protein, 112 aa, Listeria monocytogenes
MPIKVRVDLSKAKGSVKKAKERGQFALINQAAADIAPYVPFLEGDLSNQYVIMNDKEIMWTSIYARRLYNGINFNFTLTHHPLAGPKWDQRAKVDKLESWIEVAQKAVEEGL

SEQ ID NO: 2490 - protein, 135 aa, Listeria monocytogenes
MSLDFLDSVMDAIENNVDLKDMKLRTAILKPESIALLLTPNNDKQGYQDGSYERSFSFNLNGSSKQEMKVLNVLNAITAYFDNTELESIQSLNNSFVLEDKETTSVPNLVSASDDGTFIYSASFKIKLYIESEEK

SEQ ID NO: 2491 - protein, 113 aa, Listeria monocytogenes
MSYQDRGMKKWGGFLLSEHTEAMQNAEPTLVWKEAMTTEFIESVLASAMTHQSMLVIQKKPLGPEASPENDIIGRISGVENNTIYIKNSEGIIPLSFSAIRNVEERSVEKWYK

SEQ ID NO: 2492 - protein, 144 aa, Listeria monocytogenes
MRIKNAKTKYSVAEIVTGAGEPDWKRLSKWITNVSDDGSDNTEEQGDYDGDGNEKTVVLGYSEAYTFEGTHDREDDAQNLIVAKRRTPENRGIMFKIEIPDTETAIGKATVSEIKGSAGGGDATEFPAFGCRIAYDETPTVTKP

SEQ ID NO: 2493 - protein, 110 aa, Listeria monocytogenes
MLQNSQRLVAASLMMKHLRLQNPEESPSSVEVDHNTITVKVGETFTINASVLPVGASQEVTYTSSNPPKAKINSVGTGEGVAEGTANITVASKESTSINKVVQVTVEAAD

SEQ ID NO: 2494 - protein, 140 aa, Listeria monocytogenes
MAQNNVINIQLEESYQEFQLGTELFRVGLGDEMRRKWIEADEKYKKKLEKLNKYNIDNTDEMSSEDYFALEEDVKEALTEAYAVLLDDEEAFSKCYKQCKDILKMYQVYDQVAESIVGSVEKQQNEIQKKYKAKMTKKAK

SEQ ID NO: 2495 - protein, 201 aa, Listeria monocytogenes
MLSLAFGVNDIYEYEGKEYKLDLAFDNVLRVIDLTEDNSLSDVFRANLAIDVLFADDMPWPRSNEEDEYANIEEKSLVLIDIFTNYIVKENDDGLLYDIDGNKMPSATNNNDDAEEIASYSLTQDADYIYASFLQDYNIDLLDSRGKMHWYKFRALLESLRDDTTIKTIIGIRQAELPSGKGTEKERNELIKLKNRYKLKD

SEQ ID NO: 2496 - protein, 1787 aa, Listeria monocytogenes
MSDGSVVIEISLDDKKADKQLDAFEKDLAKAGTNAGAALDKAYREAVSDIASQSKRLKDTFVNAFKSMGNAGSNALKASLNFIRELPSNVQAALSKLASTVKTGFVNAAKASITAVKNLGTSIKNTAVNIKNGFFSIAKTVQSSIVSAVKISINVIKSIPGAIKSAGISIKSALVSSLQAAKSAAISFAQTTVKVIKSIPGAAKTAATAVKNSFVVAYKAVVVAAYMSVKGTISAVKAIPSATKSAALAVSSAMKTAFSAVASAAKTTGTTVKSALKTGFSAVKSGAKAAGQAGISALKGLGNIAKSTGSLIKSGLVSGFNAAKAAAKGAGAGMREALKNSVEKPAEQARFSILRLAAAFGLIAATKNVVGSAIGRVDTIDTATKSLTVLTGSAKDAQLVMTDLTAAIDGTPIALDAVALGAKKMVAAGMKAANVKPVFTAIADAAYGVGNGSESIDQMTDAISALQASGVAYADDINRLVDAGVPAWQILANSTGKSVGEMKKYVSEGSLESTRAIAMLTKGIEEGTTGMAGNTAKMAGLAKTAGNTISGSFANMKTAAVKSLANIVENLKGPIIQALDVAKNAFKQFAAVTASPEFQKKLSDLIQKIKEFIPVLIEWAPLLAKVAAGFVAFNIISSVFSKVAKLAGAIKSLTSSGSLLSVVANTIKGSFVKLVGTLGSTTAAFGVVVAAVGAVIAVIYGMYTAFKENTAGIKSFLSGMWEAVKNSFGKIIDVFKQIVSALKPVGSGFKGILKYIGVRAWVVLGFALAAVVDVIQVLARIVLVAIKALQGLYYAIKAAFQVLQGDLKGAKKSLEQSKDAFVDAGSAIKDAFNKDNYALTGTVEAFKQMGGEAEKTAKKTETSGKKIKDTLKLVESTAKQTETTVSKSNQAIDTMLSGGVDQYGNKLSEKTKSFLNSAKELYSQYQESAKKSQDAYTAAMEKAQSLEGDKRKKAIADANKTLVDETTKNNSTLLTLQSDYSNMLKTNRWADGQELTAQQKKFLQQQTTDIQTELAKQNQLYVEANLLRLEQGKSLNEKERNTSLEVQKSLYEEKKKAVETGEKSLADLKKKKADASTETEKANYQIQIDEQTKKNQTLSTNLKNWASEMNSIIANGGTLNAQTFANGLSQLGNISDEQLSALWQNFVSTSTSIDNTLAGLAGIMGQRGGEGVQAFVTALQSGDYTTAALNINNDVLSTISSLPNGMFLNGESGKNQFLTAIKSGDFQGAGKYLVDGVKMGTDSIDSEMKTKGQTGGQNFADGVKGKEGAAKSAGSAVKNKAKEGATDPNAFKAVGSKDSAGFNNGVMGGKGGAYSAGSSVGNSAKSGAGSVDSSGVGSDFASGYVNGILSGMGAVGRAAASLANKALAAVQKKQDSHSPSKESKKLGGDFGTGYSLGIADKNKAVTKAANNLVASALGTESQIKKLSSTLKDKISSAIDAGLHSKNKSSGQLKQAKALNSIEGYIVQQTNRLAATAKKRDKVVAQLKAANTKMADLTKQSKEYAASITEKMQSYGSISNVDPENPKSIQAEMQKRLKEIKAFQANVEKLRKKGVSKDIINDILESGVENGSSYAQALAKSDAKTIKAINSTQNQINSASKAMGNTAANAMYSAGINAAKGLINGLNSQKKQLEKAAKSIANTITNSVKKALKIHSPSRVAIELGKFFTGGLGNGVLAGAKGAVQSTNKMVDKVVNAASNMTVPTINLPKISAEKALGLKSVDLNRTITVKTIIDNKTKESSNADLIKAIQQSGDRPIIFNVDGKDIADNTNNHLGSSTSLAFYGKGL

SEQ ID NO: 2497 - protein, 272 aa, Listeria monocytogenes
MATSLALVIEGKTYMLNELFDLEVGEVSREPPQIVNNYTEFAGSDGARTTDSNFSMFPISILCHFRTESADLYHVKLDELLELIYQRKEYFLVHSKTPGKKYRVHPSGVGIDRKAPGYADLTLEFDVFRGYSESLSSTLSDSEIDCDKWQFGQGLAMEDYRYTHTKSRFIIYNGGSFDIDPREHYLAITLRGQNEGELTINNITTGDRFIYYPSLSTTDTLIIDCATPRINGNPCGRNTNHGLISLKKGENLIEISNTSHLDTKWDFSFLYK

SEQ ID NO: 2498 - protein, 418 aa, Listeria monocytogenes
VRHVVIFCASILNRFFASVECVKRRLNPLEAYLVVMSNAERAGGLVLAATPKMKQEHHIKTGSRMYELPTWDKRIIIAPPRMKLYLKVNAMIQAIFRRYVPAEFIHVYSIDECFLDVTGSHLLFGSTEEIVRKIQRDILEELRLYVTVGIGDNPLLAKLALDNVAKNRDDGIAEWRYEHVPETIWKIRHLDDVCGIGRRTAVRLQKMGIFNMYQLSQTPPQVLKNVMGVVGEQLYYHAHGIDYSLLNEKYVPVSKSYGKSQILEKDYHVPAEVEIVIREMVEEVAMRLRQNHVDTAVIHLSVGYSKYSIKKGFSHQAKIPPTSSSHALIPYFLQLFRRYDEREPVRSIAISCGKITLKTGLQLNLFEDFTQTLNHEQLEITVDKIRSRYGFKSLMHASSLLNGATGLKRSEMVGGHKG

SEQ ID NO: 2499 - protein, 341 aa, Listeria monocytogenes
MNSDIIVADFWKNNEEILTDFDKDSFCESWTENEMWSIEFKVAQTPKNAHCYSFLDYESSVYFRGQEFVVKQLSHDAVGKTLSKDIRAPHIYYTCQDGRQDDAITGSFTLEQCLTHIFKTDNRGFSWEIIDPSNILEKVQQENFGNNNYLTLIDQLLDDYGVVVIPDNRHLVFKPREIYGAKTENFIRYKYNTDEASFDIDTLSLKTKIKGYGKVDSNGNNYFSPITYTSPEVEKWGIRWQEPVSDERYTVAGNMQRRLKLELQDYPATTGSVILKNDYECEKGDYVLFIYEPLGIDYDVQIVAYKKYPFTIKAPEITLSNNKKSIVSIMAQLAKVLKGAK

SEQ ID NO: 2500 - protein, 342 aa, Listeria monocytogenes
MLNLDKWGNTLFDSNKYQQFNANMEKLEKDSLAKDVDINATNNRIDNVVLEAGGNNITEVVDARTSKNGQVYSTLNSRLNGDYSAIASDLAESNALLQTVNEENKVLKSKLDELYGNSASNIEYYVSSTNGNDVTGTGAIDAPFKTIQKAVNMVPKVKVGGFIYIFCEPGQYNEDVVVQSFSGAECFYIQPTNLATIDPTTGQTGFFVKSILFSGIMFQCVVQGLNSMSTAVNNNSTVIQFARCWYGTVTKCRFDTNLKATNITTVQYNQSRGNCYSNYFKNQNIIMSSEYMGHALFASTNTCEATSNVGLKAASGGILVKSGTPVLNATTAELKQAGGQIF

SEQ ID NO: 2501 - protein, 357 aa, Listeria monocytogenes
MTNQIFKSAILDFSVSAQNAKANVPQIRFSTQDSGGTARLKFTAKKDDNNLPLSSAAEVTLAMVLSVGKKYESSYIVNPEIINRTGGVFEYSLTDEQISHDGQANAELYVKYPNQTMQINRFSFVIEKAMIDDNFLPVATYYVEKWDDYEKIFNEKVEILQNEIDDLQGQATELKNTFDSLNPDQFPQKADFENHINNTNIHVTMTDKTNWNTKENTAGSQAKADSALNSAKAYTDSKMDSYGAWINVPLAAGYSTGDSNTPQYRLVAKQTSTGLKTFAEFRGAIAGTFSSTANSTVGTMPAGTRTVVTEYFAVASNNGNGGRIAIPVDGKMLQVSSTDNANPSYISLSGISYEVGN

SEQ ID NO: 2502 - protein, 105 aa, Listeria monocytogenes
MNYKQFYTYDENGDYLETILVFEDEKGLINQPKNSTNIEPSIIENGIARAMYYPSWDGSIWKEDKKRWESENPIIPAEKTEIEKLREELLLTQEALAALFESNLG

SEQ ID NO: 2503 - protein, 121 aa, Listeria monocytogenes
MYDGLTKVFDYALAKEMFFAALFVALFIILLIITKRIWDDSKIVRIEMKEEREKVEEEREKRNKESKEERDKFISTMNEQQRLMDRQNDMMKQQQQSIDSLSKSVGKLAHKVDLLEHKITK

SEQ ID NO: 2504 - protein, 93 aa, Listeria monocytogenes
MEFGKELLVYMTFLVVVTPVFVQAIKKTELVPPKWLPTVSILIGAILGALATFLDGSGSLATMIWAGALAGAGGTGLFEQFTNRSKKYGEDDK

SEQ ID NO: 2505 - protein, 281 aa, Listeria monocytogenes
MTSYYYSRSLANVNKLADNTKAAARKLLDWSESNGIEVLIYETIRTKEQQAANVASGASQTMRSYHLVGQALDFVMAKGKTVDWGAYRSDKGKKFVAKAKSLGFEWGGDWSGFVDNPHLQFNFKGYGTDTFGKGASTSNSSKPSANANTNSLGLVDYMNLNKLDSSFANRKKLATSYGIKNYSGTATQNTTLLAKLKAGKPHTPASKNTYYTKNPRKVKTLVQCDLYNSVDFTEKHKTGGTYPPGTVFTISGMGKTKGGTPRLKTKSGYYLTANTKFVKKI

SEQ ID NO: 2506 - protein, 183 aa, Listeria monocytogenes
VDEASAEYRFELLTLLNDFTEKFHGKSIILTTKGIGQIVISLYDDNLPHLLGINKVVKRKTATAILTEIRNNKITLNSIMVHKDYEKISDRVKSYYFLHDVFIHKSIQICVKVNPIDNQGDYMKLDLVFYRKDRDKCIVLGAQKTRNNNTYRLCTLHVKKTTKEPYILSKRGKIVDIIISDTI

SEQ ID NO: 2507 - protein, 270 aa, Listeria monocytogenes
MHKTIRSVDVYYEKYGEGIPIIMIHGFAPDSQLMIGCMEPVFDKESSFSRIYLDLPGMGKTENYDSIQNADHVLTLLLEFIEAVIPGEQFVLAGESYGGYLTRGIAAKMPDRVLGVLLICPVIYPEKERRTLPEQKVMYQDDTFVQSLSKGDRAYFSKSGVILTARNWNRFLAEVMAGMINADGEFLDRLSANYELSFDPDEKVQFDVPALFLFGRQDDHVGYADGLTLLEKYPHASIAILDFAGHNLQIEQPKIFTTMVQDFLFRVKPE

SEQ ID NO: 2508 - protein, 165 aa, Listeria monocytogenes
VNNHVIDLTNKKFGRLTVKEFVRSENGNAVWECVCVCGNEKEVLAQHLKRGHVQSCGCLAKENGREYAEKNLRTETAQKNALKRKLEVDAVDGTMKSALTRRLSARNKSGIKGVRWDEKRNKWEASITFQKKLHFLGRFEKKDDAIKARRDAEDKYFKPILDKMN

SEQ ID NO: 2509 - protein, 149 aa, Listeria monocytogenes
MSIKLLDEFLKKHNKTRYQLSKLTGISQNTLKDQNEKPLNKYTVSILRSLSLISGLSVSDVLFELEDIEKNSDDLAGFKHLLDKYKLSFPAQEFELYCLIKEFESANIEVLPFTFNRFENEEHVNIEKDVCKALENAITVLKEKKNELL

SEQ ID NO: 2510 - protein, 451 aa, Listeria monocytogenes
VQSIEDIWQETLQIVKKNMSKPSYDTWMKSTTAHSLEGNTFIISAPNNFVRDWLEKSYTQFIANILQEITGRLFDVRFIDGEQEENFEYTVIKPNPALDEDGIEIGKHMLNPRYVFDTFVIGSGNRFAHAASLAVAEAPAKAYNPLFIYGGVGLGKTHLMHAVGHYVQQHKDNAKVMYLSSEKFTNEFISSIRDNKTEEFRTKYRNVDVLLIDDIQFLAGKEGTQEEFFHTFNTLYDEQKQIIISSDRPPKEIPTLEDRLRSRFEWGLITDITPPDLETRIAILRKKAKADGLDIPNEVMLYIANQIDSNIRELEGALIRVVAYSSLVNKDITAGLAAEALKDIIPSSKSQVITISGIQEAVGEYFHVRLEDFKAKKRTKSIAFPRQIAMYLSRELTDASLPKIGDEFGGRDHTTVIHAHEKISQLLKTDQVLKNDLAEIEKNLRKAQNMF

SEQ ID NO: 2511 - protein, 381 aa, Listeria monocytogenes
MKFVIERDRLVQAVNEVTRAISARTTIPILTGIKIVVNDEGVTLTGSDSDISIEAFIPLIENDEVIVEVESFGGIVLQSKYFGDIVRRLPEENVEIEVTSNYQTNISSGQASFTLNGLDPMEYPKLPEVTDGKTIKIPINVLKNIVRQTVFAVSAIEVRPVLTGVNWIIKENKLSAVATDSHRLALREIPLETDIDEEYNIVIPGKSLSELNKLLDDASESIEMTLANNQILFKLKDLLFYSRLLEGSYPDTSRLIPTDTKSELVINSKAFLQAIDRASLLARENRNNVIKLMTLENGQVEVSSNSPEVGNVSENVFSQSFTGEEIKISFNGKYMMDALRAFEGDDIQISFSGTMRPFVLRPKDAANPNEILQLITPVRTY

SEQ ID NO: 2512 - protein, 447 aa, Listeria monocytogenes
MMKDMTTGNPTKLIFLFAMPMLIGNLFQQFYTMIDAVIVGKFVSVDALAAVGATNSVNFFMISLIIGLMSGISVVVAQYFGFKDYDRLKDVIATATYAVVFSAIILTVAGVLLAKPLLILLRTPANILDDSTIFLTTLFIGILPMSLYNGMAAILRALGNSITPLIFLILSSLMNIALDFLFVVYMDMGVRGAAIATVLSQTAAAIAVIYYAYRHVPFMRIERAKFKLSTPLLKEMVRIGLPSGLQGSFISIGNMALQSLINGFGSSVVAAYTAASRIDSLTYQPGIAFGAASSMFAGQNIGAGKIDRVREGFWSGIKVVTAISIGITILVQLFARQFLLLFVDSSETEVINIGVSYLLIVSLFYVVVGILFVVRETLRGTGDAMVPLAMGIFELVSRLVIGFVLSLYIGYVGLWWATPVAWITATILGVWRYKSGAWQKKAVIRRK

SEQ ID NO: 2513 - protein, 73 aa, Listeria monocytogenes
LAETVKINSEFVTLGQLLQMIDVVSTGGMAKAYLSENTIYINGEQDNRRGKKLRNGDVILVPGVGKVKIEQGK

SEQ ID NO: 2514 - protein, 370 aa, Listeria monocytogenes
MHLESIVLRNFRNYENLELEFSPSVNVFLGENAQGKTNLLEAVLMLALAKSHRTTNDKDFIMWEKEEAKMEGRIAKHGQSVPLELAITQKGKRAKVNHLEQKKLSQYVGNLNVVIFAPEDLSLVKGAPGIRRRFLNMEIGQMQPIYLHNLSEYQRILQQRNQYLKMLQMKRKVDPILLDILTEQFADVAINLTKRRADFIQKLEAYAAPIHHQISRGLETLKIEYKASITLNGDDPEVWKADLLQKMESIKQREIDRGVTLIGPHRDDSLFYINGQNVQDFGSQGQQRTTALSIKLAEIDLIHEETGEYPVLLLDDVLSELDDYRQSHLLGAIEGKVQTFVTTTSTSGIDHETLKQATTFYVEKGTVKKS

SEQ ID NO: 2515 - protein, 231 aa, Listeria monocytogenes
MNSKRLVLIVEDEDGISNFISAVLTASDYSVIKAVNGKEALEQTASHSPDVVLLDLGLPDMEGLDVLRDIRVWSKVPIIVVSARDHEREKVTALDLGADDYITKPFGTSELLARIRTALRHIQPSSKESPNDHIIRIQDLYIDDDRRLVKMDDTEIHFTPIEYKILLLLARHAGKVLTHDFIIREIWGPYPSENQALRVNMSNIRRKIEKNPAEPAYILTEVGVGYRMAEE

SEQ ID NO: 2516 - protein, 646 aa, Listeria monocytogenes
MSEENITNVQENASDYNEDQIQVLEGLEAVRKRPGMYIGSTSQRGLHHLVWEIVDNAIDEALAGFCTEIEITIEADNSITVRDNGRGIPTGINEKIGRPTVEVIFTVLHAGGKFGGGGYKVSGGLHGVGASVVNALSTSLEVYVHREGQKYYQRFERGDVVMDMEEQGETDYRGTIVHFTPDPQIFTETTEFDFDTLRTRTRELAFLNRGLTISIEDKREEHKVRKDFHYEGGIRSYVEHLNKAKDVIHEPPIYLEGERDDIMVEISMQYNTGFSSNIISFANNIHTYEGGTHESGFKTALTRVINDYARRNKLFKDSDDNLSGEDVREGLTAIISIKHPDPQFEGQTKTKLGNSEARSITDKLFSEALNKFMMENPDVAKKIVEKGVVASRARLAAKRAREVARKSSGLEISSLPGKLADCSSRNPEISELYIVEGDSAGGSAKQGRDRLFQAILPIRGKILNVEKARLDRILANEEIRTIFTAMGTGFGGDFDVSKSRYHKLIIMTDADVDGAHIRTLLLTLFYRYMRPLLDAGYIYIAQPPLYQIKHGKQIEYVYSDGQLEDYLASLDGDTKYSIQRYKGLGEMNPEQLWDTTMNPEHRTLLQVNIKDAIDADETFEMLMGDRVEPRRKFIEDNAQYVKNLDV

SEQ ID NO: 2517 - protein, 842 aa, Listeria monocytogenes
MAETPNQRITEINLNKEMRTSFLDYAMSVIVARALPDVRDGLKPVHRRILYAMNDLGMTSDKAYKKSARIVGEVIGKYHPHGDTAVYFTMVRMAQDFSYRNMLVDGHGNFGSVDGDMAAAMRYTEARMSKISMELLRDINKDTIDYADNYDGSEREPVILPARFPNLLVNGSSGIAVGMATNIPTHHLGEVIDGVLALSHDPEITIRDLMEYIPGPDFPTAGMIMGRSGIRRAYESGRGSITVRGRVDIEEKKNGKETIVITEIPYQVNKARLVERIAELAREKKIDGITSLNDESDRSGMRIVIEVRRDISASVIVNNLFKMTALQTTFGINMLALVDNHPKVLNLKEILYYYLEHQKVVIRRRTEFELRKAEARAHILEGLRIALDNIDAIIKLIRGSKTSDVAKEGLMTQFNLSDKQAQAILDMRLQRLTGLEREKIEEEYQNLVALINDLKAILADDERILEIIREELEEIKVKYADKRRTEILAGDLVSLEDEDLIPEEEVAITLTKRGYIKRLPLSTYRSQRRGGRGIQGMSTHEDDFVEHLVATSTHDTLLFFTNTGKVYRSKGYEVPEYGRTAKGIPIINLLGIESQEQVNAVINLSEFTDDSYLFFTTKHGVVKRTTLSQFAKIRQSGLRAVELRENDELISVQMTDGSKNMIIATKHGQSIYFPEENIRVMGRTAAGVRGIRLREDDEVIGMEVLEDDEKVLVVTEKGYGKQTPASQYPLRNRGGMGVKTVTITEKNGNLVAMKTVTGEEDLMLMTVSGVLIRFEIDTVSQTGRSAMGVKLIRLDEDEKVATVAKVPKEEDEVELEEEIDETLITQVPDESFEDAPGSDIEE

SEQ ID NO: 2518 - protein, 504 aa, Listeria monocytogenes
MRKLIQFLFIAVVLFLVEYVLINQAAILFLVTSGIIQLCGVIIAIRLLLFDQRNTSSKVAWVAVIFILPVLGTISYLVFGRNPATRKFSTAQVKEKTKLINAIHAIPNNTNEKLPRLSKRIAHLTSIEPIKGNKIEILTNGEETFPVLLDALRKAENHIHIQYYIFKTDAISTEIRDILVEKAKSGVEVRFMFDGLGSSKLGKAFLAPLKEAGVSIHAFDPIASPWIVRTANLRNHRKIVVIDGQIGFTGGLNIGEEYRSNTPDFRVWRDTHIKITGQAVIELQESFLNDWVYMENQAGAADGFISESGSKQYFSPVDMGDEWAQVIYGGPYDKEKWVRDSMLDLIDSAKESVWIVSPYFVPDEESLAVIRRVAMSGVDVRVIIPGKGDRGISFHGSNAYVKTMIEAGAKMYAYADDSFVHAKAMLVDGTRAAIGTANFDVRSFRLNHELMVFLYDESEAMHHLKRDFKKDFEDSRLFTMKDMENKPLLTRIKEVLSSLLSPIL

SEQ ID NO: 2519 - protein, 172 aa, Listeria monocytogenes
MSGDLKLRPLEREDLKFVHRLNNDAKIMSYWFEEPYEAFVELQELYDKHIHDQSERRFILELDGQMVGLVELMEIDYIHRRAEFQIIIDPKFQGHGYAVSATKLAMKYAFHVLNMHKLYLVVDKVNEKAIHVYEKVGFIREGELIDEFFVDGTYHDAIRMCIFQHQYREMDI

SEQ ID NO: 2520 - protein, 322 aa, Listeria monocytogenes
LATGIGTAKMILCGEHAVVYGEPAISVPFTQAVVTTNVETSIKTKFSSAFFSGDLDDMPDFLAGIKALVVDVLNEIGNGECVSIHVVSGVPIGRGLGSSAAVATSIARGLYKYFNQELDSKKLLAIVNAAEKIAHGNASGVDAITVVSEKPVWYERDRKLEIMHFPKKITFVVADTGVPSETRDAVKDVQVLYKENQVEIGKIIHQLGDISREIKTHLEGDADTVKIGAAMNKAQSYLETLTVSDSSLEKLIKVARSNGADGAKLTGGGRGGCIIAVAKNQEIAEQITKALHNAGAAQEWIFTIGEGSYESDSHRTHECGAN

SEQ ID NO: 2521 - protein, 323 aa, Listeria monocytogenes
MKATAIAHTNVALIKYWGKRDEHLILPANSSLSFTVDKFYTKTTVEWDEKLTQDTFILNNEQKTDAKVARFIDKMREEFGISAKAKITSENHVPTAAGLASSASAFAALALAGSNAAGRKDTKEYISRLARFGSGSASRSVFGDFVIWEKGELADGSDSFAVPFTNKLCDKMSLVVAVVSDKEKKVSSRDGMRLTVETSPFFENWVSAAEIDLEEMKQAILDEDFIKVGEITERNGMKMHATTLGAEPPFTYFQPQSLEIMDAVRELRENGIPAYFTMDAGPNVKVICERANENIVAEKLSGLAKNVLICHAGKEASVVSDEK

SEQ ID NO: 2522 - protein, 359 aa, Listeria monocytogenes
LYQMKNKLQVKIPGKLYVAGEYAVVESGHTAILTAVNRYITLTLEDSERNELWIPHYENPVSWPVGGELKPDGEHWTFTAEAINIATTFLKSEGIELTPVKMIIETELIDQSGAKYGLGSSAAATVAVINALMTKFYPEISMLKKFKLAALSHLVVQGNGSCGDIASCMYGGWIAYTTFDQEWVKHRLAYKSLEWFMKEPWPMLQIETLEEPVPTFSVGWTGTPVSTGKLVSQIHAFKQEDSKNYQHFLTRNNEIMKQIIQAFHTKDEELLYSAIKENRRILQELGTKAGVNIETSLLKELADSAENMGGAGKSSGSGGGDCGIAFSKTKELAEKLVNEWEKLGIKHLPFHTGRVQITE

SEQ ID NO: 2523 - protein, 368 aa, Listeria monocytogenes
VSKVLKSLLLTALLGVTGLISGCGDLTVLNPKGPVAKGQSDLIIYSIIFMLVIVLTIFVLFTIMLVKYRERKDISNYEPDMHGSKKLEIFWTLIPVAIVIALAIPTVKTIYAGEEAPKVTSHKDPIIIYATSADWKWIFSYPDESIETVNYVNIPTDRPVLFKLTSADTMTSFWVPQLGGQKYAMSGMTMNLYLQADEVGTYKGRNANFNGEGFADQRFDVVAQSEKDFKKWAKETKASSPVITQDIYDRLLIPGSSKKKTYSGTHLAFVDVAADPEYVFYAYKRFGYEMTNPHNPNTKSTISDEPMLPVRPVTVTNPQFERHDMKPQIIKNGEGYHEDKHREDEMKKMEEDIQTNEFNKKESDDAGK

SEQ ID NO: 2524 - protein, 659 aa, Listeria monocytogenes
MKWNEFIVTGDPMILGAQISIVLVSIGVVALLTYTKKWKWLMKEWISSVDHKKIGIMYLLAAVLMFFRGGVDALMMRTQLALPDMKFLDAQHYNEVFSTHGTIMILFMAMPFIIGLMNIAVPLQIGARDVAFPFLNNLSFWTFFMGAMLFNLSFVIGGSPDAGWTNYAPLATDFSAGYGINFYLLGVQIAGIGTLMTGINFFVTILRMRTKGMTLMKMPMFTWSSLITSLIIIFAFPVLTVALALMSFDRLFGTAFFTLTNGGLPMMWANLFWVWGHPEVYIVILPAFGIFSEIISTFSRKKLFGYPAMVAAMAVISLLSFLVWVHHFFTMGSGALVNSFFSITTMMIAIPTGIKIFNWLFTMYKGRITFTTPMLWSLAFIPNFVVGGVTGVMLAMAAADYQYHNTYFLVSHFHYVLIAGTVFSCFAGLTYWYPKMVGYRLNEKIGKWFFWIFVVGFNVCFFPQYFLGLDGMPRRIYTYVQGDGWTTLNFISTVGGFLMGVAFLVLCYNIYYSYKNSKREVTGDPWDARTLEWATSSAVPPKYNFAVLPEWNDLDDFWNRKQKGDPYVNDKNYKPIHMPSNTMVGFVMSVFFFIAGFGLVFYWYWMGIIGLVGILGCMIYRSFQNNDGYHVEVEEIKATEEHNARELATGVKEGNPWNL

SEQ ID NO: 2525 - protein, 203 aa, Listeria monocytogenes
MESVETNKNLPIEYRSEQGRLNILGFWIFLGAEIALFATLFATYFVMRKAGSNAGHPPAEMFELWLVLIMTFLLLTSSFTCGLAIGEMRKGNVKMLTIYSIITLILGAGFVGFELYEFAHYVTEGVTMQVGSYWSAFFVLLGTHGLHVTVGIFWISFILIQIKMHGLTPKTASKVFISSLYWHFLDVVWIFIFTGVYLLGMVN

SEQ ID NO: 2526 - protein, 110 aa, Listeria monocytogenes
MTQNNKSNAAHAEGGIPWKHIVGFALSVVLTLLAVWVALYSTLTTNVKVVIIFIFAFIQAALQLLMFMHMTEGRDGKIQIGNILFAAFIAIVVVIGSYWVMEIGHMNHLL

SEQ ID NO: 2527 - protein, 372 aa, Listeria monocytogenes
MKSRKKGIILVLSVILIFSIGLLVNNLMTNNKDTAKPKKKTVAAVKKKKETPPKPKEPFNIDFTGDIMFDWDLRPVLAEKGMDYPFNNVREELKSSDYTFVDLETAITTRTKKVPYQEFWIKSDPSSLTALKNAGVDMVNISNNHILDYYEDGLLDTTAALRANNLAYVGAGKNEDEAYQLKVADIKGNKVGFMSFCHFFPNTGWIADEDTPGVTNGYDLNLVEEKIKEERAKNKDIDYMVVYFHWGVEKTNTPVDYQTQYVKKLVDDNLVDAIVASHPHWLQGFEVYKDVPIAYSLGNFLFPDYVSGHSAETGIYKLNFDQGKVTAHFDPGIISGNQINMLEGSSKTAQLNYLQSISPNATINSNGDISAK

SEQ ID NO: 2528 - protein, 477 aa, Listeria monocytogenes
MTESKFPKDFLWGGAVAANQCEGAYLEDGKGLSLVDILPTVEDGRWEALFNPSKALATDYGFYPSHESIDFYHRYKEDIKLMAEMGFKCFRMSISWPRIFPNGDETTPNEKGLAFYDAVFDECHKYGIEPVVTINHFDTPLEVFKKYGGWKNRKCIDFYLNFCEAIFTRYKDKVKYWMTFNEINMILHLPYIGGGLDVTKEDNPEEVKYQAAHHQLVASALATKLGHEINPENQIGCMLAAGNTYPMTCNPKDVWKSIEADREGYFFIDVQARGYYPSYTKRFFKEHNINIKMEDGDLDALRDHTVDYVAFSYYSSRLTSADPEKNKETEGNVFATLKNPYLKASEWGWQIDPLGLRITMNTIYDRYQKPLFIVENGLGAVDTVEEDGSITDDYRIDYMREHVREMGEAIEDGVELLGYTPWGCIDLVSAGSGEMKKRYGFIYVDRDNKGNGTLNRSKKKSFDWYKKVIETNGKDID

SEQ ID NO: 2529 - protein, 273 aa, Listeria monocytogenes
MGTFFSKWGKWILVLGLVFSVFSVSTAGQAAAKETVINKQMVTTASLNVRSTNSTSGKVIGWLKNNTKFKAIAKTSNNWYRFSFKGKNGYVSGKYVKAATATPTPKPPTPKIVQMNVPLIVQRPQLPTGCEITNIAMMLRYAGKNVDKVKLAKEMKRHKSNPNYGFVGNPFSKSGWTIYPPALVNQVKKYTGSAKNMTGTNLAGIKNQLNKKRPVVAWVSKFHGFSVHAITITGYDKNNFYYNDSWSGQKNARISQSYFNTCWSKQAKRAISY

SEQ ID NO: 2530 - protein, 246 aa, Listeria monocytogenes
MAEPKYAIIINDIKRLISDGTFKPGEKIYSEDELKKKYNVSNTTVVRALHELVRAGILARYQGKGTYVSKSIINEEVIFNEYTTVPNGRFNRKTKITNEHTKVVAINEIQDARIAKKLQIPPENMIVHFQRIRLIDDLPWTVQNNYMAKSNLINVDLTNFEKFNSLSEVIKELYGINILHEAMKERIEVEFPVKDKNNFKLLEIDTELPLYHIERITYVPEGQPYEYIESYLRHNFYSIEIEKKKQ

SEQ ID NO: 2531 - protein, 133 aa, Listeria monocytogenes
LDYIIAAHGRYAQEVKDSCQMITGQTTNISAITFTEEMGVTDVLDAYMAVYSPVNETAIIVDIVGGTPCNAAQMFSTKHPEVKVVSGLSLGLIIPLSLGESLEEAMLGAKDNIQFVEQKASHTIVSDDGEEED

SEQ ID NO: 2532 - protein, 162 aa, Listeria monocytogenes
MGSNGIKHVRVDERLIHGQVATMWTNTIKATRIMIVDDAVVKNEMEKVALKTAVPAGVKLSILTVKGAANNINNDKYAGQQVFLIVKSPHALRGLVDAGVELPQINVGNMSTKAGSRQIKKSVSVTDENLEDFDYLAQKGIKITAQMVPSEDAVEFANLLKK

SEQ ID NO: 2533 - protein, 267 aa, Listeria monocytogenes
MDLAIWQIILLVILAACTILDALTLVIGLNFPVITGTLAGIIMGDMVLGLAIGATLQLMVLGVGTYGGASIPDFTTGAIVGTVFAVLSGQDAEFAIGLAIPVGLLMVQLDILARFTNTFFLHRIDSNIASGNISAVKRNIWYGALPWALSRAVPVFIMLTFGQSVVDFILNEIPEWLMGGLRVAGGILPVVGIAILLRYLPTNKFVAYLIIGFVAAAYLKVPMLGVALIGVALAIIYFKQNFKNPVAAGANGAALVGEENEDGEYED

SEQ ID NO: 2534 - protein, 275 aa, Listeria monocytogenes
MKMANTKTEQDFEKVLKRRDLIAANFRWLFASQICWNYERMMSTGYLYSILPTLRKLYKTDDDLKDMMNMHNQFFNTNPMVGGLILGMDMAIEEREKKASKEVVTGLKTGLMGPFAGVGDTIFGVILPTIFGSIAAYMGLQGNVTGVVIWVLVNILVVGARFTLLPLGYKQGAKLVTEFADRLNALTDAAILLGVTVVGALIPTVIKATVPFVYKSGKVELKMQDMLDQIMPSLVPVLLVALIYALLGHKKMTSTKAILLVMVIAIILFNLKILG

SEQ ID NO: 2535 - protein, 234 aa, Listeria monocytogenes
MGLTFFDKARELTEELEKTQAESIHQAAKLVADSIMNDGIIQAFGSGHSYAAAIEVCGRAGGLIPSKVIMDPAGGYYESIEGVGSLLTHRLQAKPNDIFFLISNSGRNPMGIELAEWIKSQGCKLIVVTALDASQTAASRHSSGKLLYEFADVILDNRSVQGDAALELEGLEGKVCGTSSFSAVLLLQQTIYEAVELMLEKGYTPPVYRSANIDGGYEYNFAIEDKFADRIFHL

SEQ ID NO: 2536 - protein, 213 aa, Listeria monocytogenes
MILKEVCIENTTNLVNVIEAGANRVELCDNLAEGGTSVSYGVAKHVVKICHEQNVSVMAMVRPRKGNFVYTKEEISVMIDDILMYKKIAVDGVVFGCITDSGLLDKPAINELLKAAAGLEVTFHMAFDELVETEKLSAIDWLVEQGVTRILTHGGDGAKLPEETFVQWRKYIDYAAGRIIILPGGGIKSHNLEWIIKETGAAEIHGTDLFGER

SEQ ID NO: 2537 - protein, 446 aa, Listeria monocytogenes
VINVIRFFKIVTPILLSISLVACSSASGKTEKITAPIEKDRNLSMVVTTDVHYFAPSLTDNGKAFEKYVAAGDGKQLAYSDEITDAFLADVESKKTDVLIISGDLTNNGEKTSHEELAKKLTQVEKNGTQVFVVPGNHDINNPWARKFEKDKQLPTDTISPTDFSKIYGDFGYEDAISSDEFSLSYLAAPSSKVWLLMLDTAIYKTNMQQGNPTTEGGLTAGTLDWIKESSALAKKNGAKLIPVLHHNLTDHNDVIQKGYTINYNQQVIDALTEGAMDFSLSGHIHTQNIRSAKSTDGKEITDIVTNALSVFPHKYGNITYSAKNKNFTYQSQKLDMEAWAKAQGSTDENLLNFDQFDYETFYNSGYDKAMMDLMTDESYDKYNQADKEKMADTMGLNNMYFFAGTAPPKSDGMALWDSAPNSFLKDYVLSSSNPPKKSNDYYVSP

SEQ ID NO: 2538 - protein, 634 aa, Listeria monocytogenes
MKYEQLAKDILKNVGGKENINSVFHCITRLRFKLKDENIANTKEIEKLDGVISVIKSGGQYQVVIGNHVPDVFKAVLEVGGISAEGDEGSSAPATGNIFNRFIDMISGVFTPVLGVLAATGMIKGFTAMFVAFGWITVTSGTYQLLYAIGDCLFYFFPIFLGYTAMKKFGGNIFIGMAIGGALVYPTLAGITAGDPLYTLFAGTIFESPIHVTFLGIPVILMSYASSVIPIIVATYFGSKVEKGFKKIIPDVIKTFVVPFCTLLIVVPITFIVIGPIATWAGQLLGAGTIWVYNLSPIIAGLILGGFWQVFVIFGLHWGLVPVAINNLTVLGHDPILAMTFGASFAQIGAVLAVFFKSRNKKIKSLSIPAFISGIFGVTEPAIYGVTLPLKKPFIMSCIAGGIGGGIIGFAGSQTYIMGGLGIFGLPNFFKPGSGISGEFWWVVIAIVISFILGFILTYVVGFKDPADVVVEQSNTVEGETLIERETIPAPVVGEIVTLADVKDEAFSSGALGKGVAIIPTVGRVVAPAAGTVTTIFPTGHAIGITTKDGAEVLIHIGMDTVQLEGKFFTAHVKQGDVIEKGQLLTEFDIEGIKAAGYDVTTPVVVTNSNQYLDVMITDAKEAKLEERLITLVI

SEQ ID NO: 2539 - protein, 291 aa, Listeria monocytogenes
MLVKGDTVGIICCSDGRKKEDENRIALLEQVLKTEFSLQVVFAETIFQKAESPFSGTPQARAIELMKLYQRSDVQMIFDISGGDAANQVLPYLDFDIIRNAQKPFVGYSDLTVILNAIYTKTEQMGYNYQLLHLVGKDSELQQSHFRKTFFENRVLISGEQLNEFVWRGGEVIGGNIRCFLKLAGTNFMPDFTNKIILLESLGGKEAKLASYVAQLEQLGAFSKCLGVIVGQHSEAEENGEYERIGRLYQQIGRKYKLPIFRTSEIGHSVDAKPCLIGAKVNVSRETLTNF

SEQ ID NO: 2540 - protein, 112 aa, Listeria monocytogenes
MKVEGLLGFLGAALGIGFSLMVLVIPDISQALEEESFFFYMLTIGSLVLSGVGLAGSFIVSHKPRLGGAMMVAAAIGCTMSISIMFLLPIVLLAVGGLIALINYEEAASVEE

SEQ ID NO: 2541 - protein, 269 aa, Listeria monocytogenes
LEKYLICSDLDGTLLLKNQTISPKTLNLLQQLIEEGHHFAVSTGRMYNSATDFAKLVHPKADVIASNGGVVAVSGEIIQQEKMKQSALLETFLLCQNHDLPVFFFSTDTVFYTKNPPYYFTDEEDKGRVNATKLVAIKSREIFLEHADQFINGIVIEEEDFDKLAVLRSDLEKLSDVSILSSHANNIEILPKDMDKKYAVKNLAAHLNIKPENVITFGDGENDIGMLEVAGAGVAMENASELVKKSADFVTTANDADGIYYFLKKHLNR

SEQ ID NO: 2542 - protein, 351 aa, Listeria monocytogenes
MKKITIQEIAKLSGVSVSTVSRVLNNSPSVSAAKRKKIQAIIDEHNYTPSVFARGMVNKQTKNIGVILPDISNPYFISLITQIQKFALDYMFSTILFNTMLAEPDNKNNQHPLTEEDYLKIILEKQVDGLLILGGEIDKEIVPKEYITALNQLNNAIPVVVIGSKIPELNCLFIERNLKKGVTTLVSHLTALGHKNIGFIGGEAGVKITTYRLESFKEAMTSYQHPVNDDWVVLSDYYTADGYAAMTHLLENSTTLPTALVAINDNVAIGAIRAINDAKLSCPEDIAIVSCDQFMNGDYQTPRLTSMDQHNEYLGKMAILQLISAINGQVEPMIINHNPELIIRESCGSKL

SEQ ID NO: 2543 - protein, 321 aa, Listeria monocytogenes
LDIQESVIGIDLGGTKILIGEVTKDGEVLNSKSYPSNTENQTKATETLLKVLADYTQNIGFIAPKQTGIGVGLVGRVDHKSGVWLEIEPGKSNPTPLAGILEAKTGLPVSLGNDVVCATMAEKQFGWGRETNDFIYLNVGTGLAAGFVVDGRITQGGHFNAGEVGHAVVDIHSDVLCGCGRRGCVERLASGLGIKEEALRHLNSYPTSILAETQTELTGKMVLHAAEQKDELAEKIIDNATFQLANLIMNLVRTTDPECVILGGGVTRNEHFFQKIQDNLQSNTIRFVTKGVVRSKLEKDKVGLIGAAVIGMRLGNEGGKE

SEQ ID NO: 2544 - protein, 800 aa, Listeria monocytogenes
MKPSMKRQIAQTGIIHRPLPIETEHALETLAKKKQVLSSRTLFSSKQHVSLEFTHQGAGDFTISGQDEIKLSSPVVMPHWPAGAPDDGDYTNFGNVTISASIGNEDWSGFNRVRIQVFPDFPGVTNPYLMISFKNDGTVKVPDIYGREGVHGVNLINHEWNDVIFEIEGLPRDRMTEMSFSYYLNGPERLTAGTMELFINEIKLEQISEPEISKGWLPQNNTLIYSHNGYSKDMPKVAFCANKHAATTFTIHDKETDKVVFTGKSYQNATETGNFVILDFSDLQTVGEYYLKFADMQTEIFQIGTSEVIWESSIWKSLNFIFCERCGCPVFGKHTTCHADIIAEHDGKQLSFNGGWHDAGDVSQQLIQTAEVTMALYEMAASLPEKEETLRMRLLEEGEWGLDFILKTRFGDGFRATSAGMTRWTDGLVGGMDDAIARVHNQAYENFYCAGIEAYIGSQIADNATMQNHLLRIAEEDLLFAIKELEKHGTSQKPIFWEHTYQTSESLYYATASWAASMVYQLTNKEIYAEKAAEWLDLMLEAQEKAGIRDSETSELYKGFFYRDKSHKVIQHFNHQAREHLYLLALEAALETQPSHAEKQTWLQAVEMYGDYLKKVTRFTKPYPLIPAGLYKKDEYLDEASFHLQHLLIDERAIEEYQLQFEQGIKINDEVALRKFPIWFSFRGNNAILLSAGKAASIAGKILKDKALLDIAEGQLQWVIGMNPFGQSMMHGEGYRYAQQYSVLNGEITGEIPVGMETFRNEDEPYWPEFNNATYKEVWVGNAGKWMSIVADLNKITGKS

SEQ ID NO: 2545 - protein, 450 aa, Listeria monocytogenes
MSSERSLSSRFIEGLSIFAQKISSQKHIMAIRDGFAAMIPITIIAAFFLLVNNVLLQPENGLLKFIPNVENYLGVGIQVYNATLGIMAILAAFLIGNFLAKSYGMEGRTEGVIAVAAYVVLIPASSHLMSVDGKAFEAGGVLTQEMTSSTGMFLAIIAALVSITMLAKFSKSKKLKISMPESVPPAIAKSFNILIPSFLVLSILAIIEVLVVSFVSMSIPEIIVKVLQIPLVGGFQTLPGILLYVFLAGFLWVFGIHGAFVLGAISGPVLLTSLQQNIDAVNAGTALPNIVTQPFLDAFVYMGGGGTIICLVIAIFIASKRPDHRMVTKFGLIPSIFNVSEPLMFGLPVVFNPIYGIPLVIAPLASTAMAYFATSWGWISQTYILIPWVTPPVLSGYLATGGDIRASILQIAIIIVGTLIYLPFVLVANRAYVLEQKAAGKVEAVTNGEV

SEQ ID NO: 2546 - protein, 361 aa, Listeria monocytogenes
MKPTMMTYINEEEEMCRAILANFQTNAEKLESLVKNGAKEWLILATGSSLNAAQSAKYYIENIADVRITVEEPFNHLYYEKLSNHLDLVIGISQSGQSTSTISALERVKKEASVPVVALTSDVTSEIAEFADITLDIGSGKERVGYVTKGFTATVLTLMLTGLHFAYKTAQIDETKFNNEINAFSRATNAIPATIAETEAFYERWQEEFATAPKFTAIGYGPTVGTCKEFETKFSETVRVPSQGLDLEAFMHGPYLEVNPQHRIFFLETESAVTERLVALRNYESKYTPFTYTVKFGTAGNDRTLLIPADLDEYQAPFLMILPFQILAHHIAELKGNKLTERIYTDFGVAMKSKTKPGDYA

SEQ ID NO: 2547 - protein, 341 aa, Listeria monocytogenes
MNKKRDFIDTKDFSKEEILFMIEIGRKMKESIKNGHYPQLLKHKTLGMIFEQSSTRTRVSFETAMTQLGGHAQYLAPGQIQLGGHESVGDTAKVLSRLVDILMARVERHQTVVELANTAAIPVINGMSDYNHPTQELGDAITMFEHLPKGKKIEDCKIVFVGDATQVCASTMFMATKLGMDFVQFGPKGFQLREEHLKVAEENCEVSGGSYLITEDVDIALKDADFIYTDVWYGLYEAELSEEERMKTFYPKYQVNKELISKAAPHVKFMHCLPATRGEEVTDEVLDAPYSVVIDEAENRLTAMRALLVYFMNPYVKEAGFAVAEKYDAELELLLRNGAGL

SEQ ID NO: 2548 - protein, 461 aa, Listeria monocytogenes
LEKKKKFRLFDAVLMAVCVVLVVESAAPAAAIGSSQFFWWIALLILFFLPYGLVSAELGTTYDDEGGIYDWVKRAFGRKWGARVAWLYWINYPIWMASLAVLFVEVITQIFPVSFGTPVSILIQLIFVWIVVIVSCYPVSDSKWILNIAAFCKVAIMLCLGVLGIYFAITKGLANDFSGKALLPTFDLESLSFISVILFNFLGFEVVTTLASDMENPKKQIPQAIIYGGILIAFFYLLAAFGMGAAIPTSELSTSGGLIDSFIMLIGGVNPFVIIIGIMFMYTLVANLVSWALGVNYVAMYAAKNKDLPAVFGKTNPKNDMPTGTSILNGIVASVLIVAAPLIPNENIFWAFFALNVVALLGSYILMFPAFLKLRKLDPDRERPFKVPGGKILLYLMTFVPMILLIITLIFSAVPLNGSSAELNEKIPILIGTIVAVIVGEICIWLAGKRKDKGEIKNEND

SEQ ID NO: 2549 - protein, 363 aa, Listeria monocytogenes
MRTIDSSSKKDGFRMPGEFEKHAGCYIIWPERPDNWRLGAKPAQKAFVDVATAISHFEPVTVVASSSQYVNARYMLSDEIRVVEMDNDDAWVRDSGPTFVVNDSGDVRGVDWSFNSWGGLVDGLYFPWDKDDQVAQKICELERKDRYRLADFVLEGGSIHVDGEGTLVTTEECLLSEGRNPQLSKQQIEMVLKEYLNLEKIIWLKRGIYLDETNGHVDNIFNYVRPGVVALAWTDDETDPQYEISKECFDILSNETDAKGRKLEVHKINVPKPILITDEESKGVDAVEGTLPREEGDRLAASYINYYTANGGVIFPLFGDPNDELAREKLQQLYPNCEVVGVKAREILLGGGNIHCITQQVPR

SEQ ID NO: 2550 - protein, 313 aa, Listeria monocytogenes
MNQKIVVALGGNAILSSDASAEAQRSALEETAEYLVQFIENGDDLIISHGNGPQVGNLMLQQHAGASEKNPAMPLDTCVAMTQGSIGYWMQNALDKAFLKHGLDKVAVSLITQVVVDKDDPAFEKPTKPIGPFLNKEEAEKEMAETGAIFLEDAGRGYRKVVPSPRPLSIKEHQIIKQLVDSGVVTISAGGGGVSVVENGLDLSGVETVIDKDFASEKLAELIDADLLVILTGVENVYINYNQPNQKKLEQVTVSELEKYIDEKQFAAGSMLPKIEAATAFVKERPHAKAIITSLENIGAMLERGAGTVIVAG

SEQ ID NO: 2551 - protein, 369 aa, Listeria monocytogenes
MGQLKGLPVEDGFRMPGEYEPHIGCFMIWPERPDNWRLGGKPAQQNYKEVAVAISNFEPVTMFVSPNQYKNARKELPDTIRVIEMSNDDAWIRDYGPSFLVDDKGDMRGVDWGFNAWGGLLDGLYFPWDKDNQIAKKVCELERIDYYSQKDFILEGCSIHVDGEGTLVTTEECLLSEGRNPNLTKIEIEQTLKKYFHAQKVIWLKHGFYLDETNGHVDNIFNFVAPGEVVLSWTDNKSDPQYEISRECYDILANKTDAKGRTFIIHKLHCPDPVLITQTESEGVEAINGTFPRQAGDRLAASYVNYYTANGAIIFPLFDDPKDKDAQELLEKLYPDRKIVGIKAREILLGGGNIHCITQHLPDKSTIRE

SEQ ID NO: 2552 - protein, 259 aa, Listeria monocytogenes
MDFYEISSKTVASLTRNERILFDYVVKNMNLIKNQSIREVSAECFVSTTTFLRFVRKLGFTGYSEFTTVLKFTLLGHTELKPSPFVVEQSDYREEYLKNIIESVRVLEPSKIKKITKKLVNKPRIYFFAKGLSKHAAKYIKYLYTMSGFLVEFPEDYQYRQAVLPHIGKDDLVFILTYGGHDIELIQTAQKLKSRNETPMLISITGADNNIIQNMSDINLYIFTDEIEMNNLDITSRISTIAIMELILYQFMEDETSSF

SEQ ID NO: 2553 - protein, 219 aa, Listeria monocytogenes
VDFITYIIDFILHIDQHLVEIINNFGIWTYIILFLIVFIETGLVVFPFLPGDSLLFAAGALSVLDGSILHIVPLIITLWLAAVLGDTVNYHIGKKIGTSIPEDSWFGKLINKEKMEKAEAFFNKHGGKTIFIARFMPFIRTFAPFVAGASRMNYRYFLNYNILGATVWVLLCTLAGYFFGNFPIVKDNFSLVVIGIIVVSVIPMVVSFIKSKMDKKSAE

SEQ ID NO: 2554 - protein, 410 aa, Listeria monocytogenes
MKMEQALNITSEIGKLQTVLVKRPGSELENITPEYLESLLFDDIPYLKMMQKEHDFFAKTMRDSNIEVLYLEKLAAEALREANNKESFLTKMIKESNQMDESALYVRDYLMSFDEEEMIRKLMSGLKKSEIPERKKKHLNEMMDEQYPFFLDPLPNLYFTRDPAAVIGNGVTINRMFQPARRRESIFIELILKHHPRFSNQDIPVWSGRGEPFSLEGGDELVLNEETVLVGVSERTDARAVERLAESLFNRSPKIKRVLAVEIPETRSFMHLDTVFTMVNFAQFTIHPAIQNQQGELNIYILEKSENGLEITPRRDFQRVIAEVLDEPEIDFIPCGGEDVIVSAREQWNDGANTLAIAPGEVITYDRNQVSNDLLRSAGIKVHEVISSELSRGRGGPRCMTMPLVRENLK

SEQ ID NO: 2555 - protein, 896 aa, Listeria monocytogenes
METNRPSPDALLVNLQEETDSSVGKLKIYFGFAAGVGKTYAMLSDAKDQLAAGVDVVAGYIEPHARVETLRMLEGIPIISPKAINHKNIALKEFDLDEALKRKPELILVDELAHTNAAGVRNKKRFQDVEELLQAGIDVYTTVNVQHIESLNDIVEGITKVAVRETIPDYVFDEADRVKLIDIEPDELLKRLEQGKIYQPERAQTAMQNFFTRENLKLLREIAMRKAADRISHEYDQTGVYPEKRASSKWLVCIGTSPSSAKLIRWTARTAEAFRAPWTALYIENEENDYMTKAEKKCLRETMELAERLGAEIVTLAGHDIAETVAEYARLTGVTNIVVGKSRRRMGLRSLFEEDFEDRLITHLDNVDMHIIPSSHPKAKKRRMKMRFKSFLTWHDMAKMVLLLALATAICVGLSEFGIGDQNVIMVYILSVLIISRVTSGYVYGVLGSIIGVMLFNFFFTSPLYTFNTIQAGYPVTFGIMLLVALITSALTVRIKTQASLAVERERRTEVLYEINKQLLVTRNLKGIINLTNEYILHLFSRSVIFYSADPAKSNEGIFVQAEGKEDASALLSADEEAVAHWVFKNKKRAGAGTDTLMGAFGYYMPVMSQGKVLGVIGVSCSPEEGPLTQDNRIFLRMISSQVALALERQYLSEEQRQIVIESAKEKMRSNLLRAISHDLRTPLTGIIGASSALLEKEDELDKETERNLIRGIKDDSGWLIRMVENLLSVTRISEGLVSLERAPEAVEEIVGEAVGRIKKRFRDRTIHVKVPRDLLMVPMDGTLIEQVLINLMENALRHGGTGAEVWVDVTKTKQSAIFSVRDNGKGIPENRLADLFDTFAVEARERSDMSRGLGLGLSICMSIIRAHDGTLEAKNNKHGGATFWFTLPLDGGDGK

SEQ ID NO: 2556 - protein, 87 aa, Listeria monocytogenes
MIISDSKIFEQMENELAKAKAATTKASQDKHLHGLMLLVQLAKTGDETTAAVEPIAIQPTEPAQIASMDGKKIELEDGANGDSLLDF

SEQ ID NO: 2557 - protein, 187 aa, Listeria monocytogenes
MKTELEKMIAGEMYDPSDRELAHGRNRARKFCREINDAMDSESRASVLKRLFGGTKENVYVEPDFRVDYGSNIYVGENFYANFDCVILDVCEVHIGDNCMMAPGVHIYTATHPLDPVERNSGLELGKPVEIGDNVWIGGRAIINPGVKLGNNVVVASGAVVTKSFPDNVVVAGNPARVIKTIEVEEK

SEQ ID NO: 2558 - protein, 125 aa, Listeria monocytogenes
MKKTIITGAIFAGLAVLLGAFGAHALKDVLGSYASTWETGVQYQMFHAGGILVIGLLMEKQASRLYTWAAILFATGIVFFSGSLYVLSISKVSILGAITPIGGVCFVVGWFLLILGVSRRTMSRY

SEQ ID NO: 2559 - protein, 311 aa, Listeria monocytogenes
MTYALEIKGLRKIYSTGVEALRGVDLTVEEGDFYALLGPNGAGKSTTIGIITSLVNKTSGQVSVFGYDLDTDIVRAKQQIGLVPQEFNFNPFETVQQIVVNQAGYYGVSRKEAIKRSEKYLKQSNLWEKRSERARMLSGGMKRRLMIARALMHEPKLLILDEPTAGVDIELRREMWTFLRELNESGTTIILTTHYLEEAEMLCRNIGIIQSGELIENTSMKSLLSKLQFETFIFDLEPYEEAFEITGYNHVFEDKQTLSVEVERNQGVNHIFEQLSEHGIKVLSMRNKSNRLEELFLKITEEKHQVGEKHV

SEQ ID NO: 2560 - protein, 256 aa, Listeria monocytogenes
MFNLYYTALKSLAAKETNRYMRIWVQTLVPPVITTSLYFIIFGKMIGSRIGDMNGFSYMEYIVPGLIMMSVITSSYANVSSSFFSQKFQKNIEEILVAPVPTHIIIWGFLIGGIGRSVLVGALVTLISMVFVPIHIHSWTIGIITFLMTAILFSLAGLINGIFARSFDDVSIVPTFVLQPLTYLGGVFYAISMLPPIWQAISKVNPIVYMISGFRYGFLGVTDVPVVISLSILVVFSVVLYSICWYLISKGRGLRS

SEQ ID NO: 2561 - protein, 294 aa, Listeria monocytogenes
MMNKENPLNKYHTGKFEKQRQDYPGLQSKMTPVPDTGESSYQGANKLTGKKAFVTGGDSGIGRAAVIAYAREGADVAINYHPDEEVDAQEVKAIVEEAGQKCVLLPGDLRKEGLAKDLVKKAYNELGGLDILVLNAGLQQYQLDIQKLPAEQLRDTFEVNVFSVVFAIQEALNYLKAGASIILTSSIQGVKPSAHLVDYAMTKSSLISLTKSLAAQLGEKGIRINAVAPGPIWTALQISGGQPQDSIPEFGQDQPLGRAGQPAELASAYVLLASDEASYTTGQVYGITGGAPIN

SEQ ID NO: 2562 - protein, 202 aa, Listeria monocytogenes
MNKRRWIFSTVVTAFLLIIGGFLVYQQMIPKPFTEVVAEAKIDGYESGDELENASTVIVTGQLEKRGDSIIERASDDAVIGVYRMSTFKIAQVLKNETDDNLAKEMTIPIYENEGYDAKTNTTYHIAGYTKMEKEEKYLLLLQKDSEDDYYIPTAVIFGKINLDPNKRNELFPKNSDTEVAINKVQAEVLKNLEKEIDREDK

SEQ ID NO: 2563 - protein, 142 aa, Listeria monocytogenes
MGFLEAYKSFWRNYVNFSGRAPRSAYWYVVLWNVIIFVILYALAFIFGISAIMEAAMGGTGMAGGGGAIVLVIILWLYLLAALLPTISLMVRRLHDSGKSGFFVLLSLIPFAGGIIMLIFMCLESDGPNQYGDGDIDSKFDF

SEQ ID NO: 2564 - protein, 306 aa, Listeria monocytogenes
MPKSEIRKLLQEIKKQVDNPGNSSTTEIKKMASEAGIDEQTAEEIYHLLTEFYQAVEEHGGIEKYMHSNISWLKIELELLSACYQIAILEDMKVLDISEMLSLNDLRIFPKTPSQLQNTYYKLKKELIQVEDIPKNKPGRKRKTQKNTKKEKTNIFGKVVPAEFKAPASIKEQISYDKSREKNLVDLLSGVKSNVQLLSENQGEENNVYDLLKSIYSLSSLAVQKEELDKKYQDLQTKCQELEQENSYLKQQNETMTDSFHTLVLQVADFAYASDLDQIQALPLFSQQLVVTLNQLGVFKENYKQM

SEQ ID NO: 2565 - protein, 104 aa, Listeria monocytogenes
MEYFLSLLKIIVLLAVLAGISYFLVKKNKQANRTRKSENDLIKLKDTLLISHQLRAVLLEADGEKVLAIISNNDIRTVSLKGKNDQNEKLFRELLLKEETKENA

SEQ ID NO: 2566 - protein, 255 aa, Listeria monocytogenes
MRKITSRRVFQVSFIVIFAISLVVFWPGVNVHAESWMDSLGVNGTDGVNSSVALFVLVTVLSLSASIVLMFTHFTYCIIVLGLTRQGLGATNLPPNQVLVGLALFLSLFMMQPLITAWYDDVYKPSQKEEWSASKVWDETQPLLTKYVAENTYKHDINMMLKAEGEDPVTKKEDAPLMALMPAFILTQITQGFLTGMFIYLAFIFIDLIVSTLLMYLGMMMVPPMTISLPFKILVFIFIGGYGLITNMIFQTIHF

SEQ ID NO: 2567 - protein, 90 aa, Listeria monocytogenes
MNLTPITQIFQDFFYSGLALILPVSLICIVVVIVVAILMAMMQIQDQSLTFLPKIVAFVVALFILGPWMFEHMTDLFVGIFSKLPLMIRV

SEQ ID NO: 2568 - protein, 253 aa, Listeria monocytogenes
MEFEFFLAVVIVFSRVASFLFFFPLLKGRNIPNSVKVVFGMAISIPVATWVDVSGITTLPDLLLRVTSEVVFGLALAKLVEIIAVIPKMAGFMIDYDLGFSQVNLIDPSYGTQNSITAAILDTFFVVIFLSLQGMDYLIYYLMKSFEFTASVSILFEKGFIDLLLGTLGFALASAVSIALPIMGSIFIVNIILAFISKSAPQINIFMNAFIIKITFGIFILACAVPILSTVFKNLTDEMIQQYVSFFDYLLKK

SEQ ID NO: 2569 - protein, 348 aa, Listeria monocytogenes
LAKDNKTEKATPRRIKKARNEGNVAKSKELNNAFSLLIVAGLLYFFGEMFIKNTIQAFVALLKQPPKLANMESYSLFYLMEFGKVLMPIMVMVVIFGLMNYGVQVGILFSAKAVKPQFKRLNPANYFKRVFSVKGIVEVVKALLLITLLSYVAYIGFRDHLDTLISYTGQNWLYSLGQIFALFKNEFLALFLVIAVIGLLDFFYQRYDYKKGLRMSKQEIKDEMKDSEGRPEVKQRQRSIARGLLQGSITKKMADATFVVNNPTHISVVMRYDKTKDHAPKLLVKGEDELALFIRQVADTDGVPMITNRQLARSIYYTTNPDEYIQEDLYKDVIEVMKELMDADKIKF

SEQ ID NO: 2570 - protein, 691 aa, Listeria monocytogenes
MGNLGAIKKYFAILIAVSFVIALIVPLPPFVLDLVLVTILAFSVLVYMRATSIKDWNELKSFPSLLLLMGIFRVSINISTTRAILTTGDPGQVIKQFGNFVIGSNFVVGIVIFIILIVFQFIVANGSSRTAEVAARFTLDALPGKQMAIDADLNQRLITEPEAKEKRAYLNMETEFYGAMDGAGKFVKGDVLFTVLLAVVNIVFGLIVGMVQGGLSFGEAAVKYTELTIGDGIVSQIGSLLMAMSAGVIVTRVFDGSDDNVAVGIFKELMQNSVVVYTLAAMFILMGVFSPLPTIPFVGIGVVLGIIGYRTQFNLKKKEQLELEKEMELIQSETNSAEAEHNQAFGAAREKFPVVVELGLNIAALVKQKMNGETAKDKVVLMRKSILQDLGIGVPGINFKDNTSFQPRGKYEIKVKGVAVASGVLKAGHLLALKTPGVMMDLDAEPTKDPIFGEDGYWILPGELEDAQMKNYQVLEPLSILITHLDVVLRKNLHELLMRQQIKDLIDGLADENQILIDEIKKKEIDYSLIQGVLRQLLKEGISVRDLPTIVEGIIDGQTIYPNDLDGITAFVRERISKVICEQAKNQDGKIYALLLQDSIEMDTEIVNTPYYGYALNWALDKELPIIQKVRDTVNKAQLTGREPVILTRRKDFRFGFVRVLERYQLDVPVLSISELSPETEVEQIALIEPT

SEQ ID NO: 2571 - protein, 407 aa, Listeria monocytogenes
MGKHLVEKMEIFKGNSKREIHKKIQLVTNEPYKITDERVTKLGIFKKQYEVTAVIMSEVAIADGRMDFQETFQKSVVKTRPKTDDLLKKEKLLEMLAAGAELAQSTPLLEERKTQEEELSSMRLELAALNRELAVKMREEREQNSDFVKFLKGRGISDTYVADFMQAGRKQFKQVETAHLDDITDWFVPYLSGKLAVEDSFDLSGHRIISLIGQTGVGKTTTLVKLGWQLLKQNRTVGFITTDTFRSGAVEQFQGYADKLDVELIVATSPAELEEAVQYMTYVNCVDHILIDTVGRNYLAEESVSEISAYTDVVHPDLTCFTFSSGMKSADVMTILPKLAEIPIDGFIITKMDETTRIGDLYTVMQETNLPVLYMTDGQNITENIFRPKSRWLAERFVGTDRRQVVE

SEQ ID NO: 2572 - protein, 259 aa, Listeria monocytogenes
MKGLYIGAAGMMNYMQHIQVHSNNVANAQTPGFKFDQLTSEVISRNKVNYQNGPVTRQVGTIDYGVRPAATHINLTAGSSYITNRDRDFFMQDTDPTQGSNFFITAKNGEISLSRGGQFHSDQFGFLRTADGANLLSATGEAIQVGQKTSIRAEANGDLYNAETSQYLGRLGTKFVSANQADSLVKDGEGRLHINGVNTMNLPAGQGIIQNGVIETSNVDLGIEMVQLMDNQRMVQASKNVVNMFDKVYDKEATGLIRQ

SEQ ID NO: 2573 - protein, 262 aa, Listeria monocytogenes
MIPDLEKDYLYFTRVVKRDLGLDLALYKETQMKRRILSFIVKKKYITFGEFFKHLKKDAVLLDEFISLITINVSSFFRNRNRWDALEKQVLPRLLEDSRGKLRVWSAACSSGEEPYSLAMMMERSVGTRHYDILATDLEPAILKRAVIGEYQSRQMEELSEQERHTAFVEKGDTYQILPKYRKSIRFRRHDLLTDYYEKGFDLIVCRNVLIYFTAEGKHQAYQKFAESLRRGGVLFIGGSEQILNPADYGLATLNNFFYIKT

SEQ ID NO: 2574 - protein, 111 aa, Listeria monocytogenes
MGRIENIKNLAFFEDKPGLAEQILMLEKKTQLFLPNEFEIRQTVGYEIGDKEVILGRLESFYFLALKGVGENNYRSQAFASEADAKAFFVHLPEMENELVAFWLNEVELVR

SEQ ID NO: 2575 - protein, 283 aa, Listeria monocytogenes
VEITTIIGLVLAVIVIAGSFMIQNISLAMLFSAEALIVIILGTITAVMMAHPWSDVKVVPKLFKILFTKEKMPDKVDVLVQYKEYADEIRRSGVLALEDSVDEIEDPFMKRGMRLVVDGQSSPEFLRDVLEEEVASMEERHAAYAKIFASAGAYAPTLGVLGAAMGLIHAMGEMSNPDKLSEAIAAAFVCTIFGIFTGYVLWTPFANKLKVKSQKEVHLRYMMIEGVVALQERNAPRVVEERLLSFLSPKEKDVLRNGKGKKTREVEEIERGQASQETAGGTR

SEQ ID NO: 2576 - protein, 275 aa, Listeria monocytogenes
VAKRRKKPQEEHVDETWLIPYSDLLTLLLALFIVLFASSSVDAKKFEQMGNAFKKIVEEGAAGNQAYVSKEKGPDDPNVNAVLKAMEEQDKKKEANEQEKAKKAAAALLKKQNEEKIEAFKKQIDSYIAAENLGTKMTTKYSDEGLLITIRDDILFQSGSAELSAGKREIAKEIGELFAQGKGTMEGIVSGHTDNVPISTSIYSSNWELSVARAVNFMEAIIQENSEVNPGEFSARGYGEFRPVAKNDIAANREKNRRVEIMVRPINRDTLDEDE

SEQ ID NO: 2577 - protein, 166 aa, Listeria monocytogenes
LQLFLSGSHTLTDYDKQEIQAYLEKFAPVNHIHLLCYKSIENEVLQFFLKKEHLAPRLSIYTFAPKECLPEPFLSAIDYLERLGSSYQSFGYFDTVIAKPTYEKFLAQIVSKMDLVCCFYNGDKPTDVIPVDVAKAFDVQSMIYDLPKAKKHLLHRASSDKIKLVN

SEQ ID NO: 2578 - protein, 637 aa, Listeria monocytogenes
MRPLISICMIVKNEAHILRQSLASFRKFTEEIIIVDTGSTDETKEIAQEFTDFVYDFEWTGNFSDARNFAAKHATGKWILAIDADECLEEESYRKLEKQLKSPTEPIQMAQIISFTGEKGRVTTTNQMARVYKNDGTICFRGVIHEQLEAIDKRPIAAGVAEVKIYHYGYMSEIVEKQDKSDRNLRLLEKEVKNNKNSGFVHFNIGQEMNRLGNKKEALKEFSEAFRLRDHNHYIWAKLSAYHIAELLEQEKRYDESLAIIEEARVIWPNVPEFPLKKANILYVNHQLEDAKEIYQSLLENTAIDYQPIVLYEATNFMPHKMLGTIYLEEKDYTRAMTHFSKAYAENSSDYGVMFQMIMLLSKFHQPKEIFAFMERHHFISSTETGLRLLSMTTQQGYAELSELIVQSLTDVYPPVAEATEVKIATIRNVFPVISESAILFGVKEELIDAADLCLWHYENPQLPIENVMKNSDVGDIYDFIFENGPRISKKRYLFVLERAIALGKGEFADYLLALRNVYHDSINSHIADLFFQYDFADIALDFYNIVDADEVTKQGYINLINYLVDADVLDEALAIAERGIDNFSTDFRFYLWAIKIDTENRANRISEAMDEFPNNRYLAKLLDEVTMLQDTVTNNR

SEQ ID NO: 2579 - protein, 302 aa, Listeria monocytogenes
MTEEKGILLQSGTNELEIVTFTVGENLFCINVLKVKEIIHPLEVTPVPDSNPAIEGVSQVRGEIMPVVNLARVMKLPEIEPENTKFIITELNQMKIVFRVDEVHRIQRISWEQIEEPEKLSIGLEELAVGIVKLDGNLVLLLDYEKIIYEISGNADFAVTGEDRIARKVNREEKTIFIAEDSQMLRQLLEDTLHEAGYTNLQFFANGREAQEHIFKLLKEQKEQTFENVNLLITDIEMPQMDGHHLTKVIKEDEIGRELPVVIFSSLITEDLEHKGAGVGADAQVSKPNIHQLINILDELVL

SEQ ID NO: 2580 - protein, 190 aa, Listeria monocytogenes
MKRFMQIWKPAVIGFLLLTLVCGVLYPGVVTVFAGVAFHDKANGSIIEEKLADGTTGKVGSAEIGQTFTEPEYLIGRAASDGVATNLNPTSEEQKQLVEKRIAWWHKLDPTNNRVIPMDLVTASASGVDPDISEAAAAYQVDRISRERGISTKEVKEIIAEHTSNRLLGFWGEPTVNVLQVNLALDRLKM

SEQ ID NO: 2581 - protein, 287 aa, Listeria monocytogenes
MKVNTNIISLKTQEYLRKNNEGMTQAQERLASGKRINSSLDDAAGLAVVTRMNVKSTGLDAASKNSSMGIDLLQTADSALSSMSSILQRMRQLAVQSSNGSFSDEDRKQYTAEFGSLIKELDHVADTTNYNNIKLLDQTATGAATQVSIQASDKANDLINIDLFNAKGLSAGTITLGSGSTVAGYSALSVADADSSQQATEAIDELINNISNGRALLGAGMSRLSYNVSNVNNQSIATKASASSIEDADMAAEMSEMTKYKILTQTSISMLSQANQTPQMLTQLINS

SEQ ID NO: 2582 - protein, 119 aa, Listeria monocytogenes
MLKLLIVDDAMFMRTMIKNIVKDSDFEVVAEAENGLEAVKKYDEVKPDIVTLDITMPEMDGLEALAQIMAKDPSAKVIMCSAMGQQGMVVDAIKKGAKDFIVKPFQADRVLEALEKAAK

SEQ ID NO: 2583 - protein, 618 aa, Listeria monocytogenes
MTTNMLDLFIEEASEHLQALNDNLLQLEKDPTNGQLVSEIFRSAHTFKGMSATMGFQQVADLTHAMENVLDEVRNNRLAVTEHLVDIIFTCTSHLETMVSDIQHGGQGAADISKTVADLEALLHPEQETDLTVEKTYRIAIQIEEAAILKAVRAVMCLERLAEMGIISETTPDREAIELEEFEQSFEVVLESAQTKDEIKAVILDISEIEKVTVTEEVEEVQVIEPIKKAAKQTTKRLENKTIRVQLEKIEKLMNVFEESVIERARIDEIAEKTNNKELMEHLGRFSSISKEIQNGLLNMRMVPVDSVFNRFPKMVRTLAKELGKKIDLVIEGADTEVDKIVIDEIGDPLVHLIRNSVDHGAETVEVRRKNGKNETATINLKAFHSGNNVVIEIADDGAGINKRKVLEKAIAKNVVTRAESTKMTDAEIFDLLFDSGFSTADQVSDLSGRGVGLDVVRNTILKIGGKISVESSENAGSTFRIEIPLTLSIIQSMLVATSERRYAVPLANVAEAITINPADIQHVHGKDLINYRETIIEVLDLGECFHETPLNDTDELLLLVVKNAKRTFGLIIKDIIGQREIVLKTLGGFFSESQIAFSGATILGDGRVVLILNLETF

SEQ ID NO: 2584 - protein, 99 aa, Listeria monocytogenes
MEQVFQVELPEWEPKETPQEGREKGSIRQVDNIGVNLIVRLGKKEMPVGDIAELSIGDVLEVEKKPGHKVEIFLDEKKVGIGEAILMDENFGIVISEID

SEQ ID NO: 2585 - protein, 136 aa, Listeria monocytogenes
LKQEAYNAVKMKVDQEKTAILKELQLLLSKREKVAEKLAHEKEVYYSRTKKERLQVVVLAGSMQLDAFSPSRIQQMEREITQISQYIKSNEQILEKLEEKGKQAKKMYDDTRKKWQQLENKREEQTLRDLKMVLLK

SEQ ID NO: 2586 - protein, 348 aa, Listeria monocytogenes
MLIPDNLLQPVVGKKQVEPKESLAEELVELPFISLLMENSPAPLIKGEADNEEQATIPLKEIAPSLVSAKLLDSEPETKLPSAPLELKEVKETLAAIAKQAIDQPKIDSAPQVAQPPEMNTPKEPTKNTTREQQPPPELIMPTKDSPKLAENVAKNQPALAKLPQEKEAVQLFKASIKEPVTAKEEVAVKKPAESSNIWHDTTKQLTPAAKVEVPVTLKQLDKTITDQIEQLQKFQVKQNKAFFAIQPESLGKVEVLLKKMPDKIFVHIEYQEQTAKQKLEQMAQDLHNRFRDRGVEVAVTMTEKQAPKENGQGSEGRHHGESKKEKERENPHQEKAKQQVFDLEEET

SEQ ID NO: 2587 - protein, 140 aa, Listeria monocytogenes
LDGISSLSGASQDTNNAVTSSVSKTLGKDDFMKLFLTSLQYQDPSSPLDTNEMMSQMAQLSLMEQVANMTTAVDKLSEQAQNSALQSAVNFIGKDIKGVSLNGEVISGKVESVQQTTNGVMLKLKDNDSLVPMTYVTEIN

SEQ ID NO: 2588 - protein, 411 aa, Listeria monocytogenes
MNQTMYTAISGMNAFQQALSVTSNNIANANTTGYKKQSVVFNDLLYQNTMGSVAGGLYAGTNPMSFGSGSKIGAILTDYTAGSPTSTGRNKDAALQGRGFFIAGDNAGGNIVYTRDGSFAVSDNNYLTTQQGKYVMGYATDKNGNVLNGNLQPIQIPLNSAIPGEATKNGSLSGNIPLDWGEKDTISSELSVYDNAGGKHKLQVNMKAATPDASGNVSYEYEIQMDGKALTPPVTGTLNYNAQGELTNPDALKNIQINSTVNGKQVNMGLNLSGLTNYGTNQVFSPTSDGKGAATVKDYAVTDSGYIAVSYSDGTVIPVAQLAVATFSNEDGLVKMGNGEYVPGLSSGDAVYGVAGQNGAGGISGSSLEGSNVDLSREFVNLMTYQSGFQGNTKVIRVADDVMKQIVNLIQ

SEQ ID NO: 2589 - protein, 330 aa, Listeria monocytogenes
MSDKLSQEQIDALLSQMSEGKVVDESTEIGDFGRFHPYDFHKPEKFGAEHLESLKTIASAFTKKSMEFVSQRIRIPIHTEATLADQVSFASGYIETMPNDSYIFCIIDLGNPELGQIIIELDLAYIIYIHECLSGGNPKRKLSERRLLSVFEELTLKSILEKFCEALKDSFKSVHPISPEIVNIETNPALLRVTSPNDMMALVSVDIKSEFWISTMRIGVPFFSVEEIMNKLENVVEYTFDKRRNFDAEVEQELHQVEKEARIRVGEIKTTWKELNKLEVGDVLLTETHIRDTLKGYVTEKWKFECYMGKSGNQKAVKFMRHTGRTEQER

SEQ ID NO: 2590 - protein, 515 aa, Listeria monocytogenes
VEQLLEKNITQMELDVIGEIANISFGSASTVLSDLLHQQVTISTPKVEIVDLYNTKDIDIPHVVLEVNFHKGIEMRNLFVLQSEVAAAIADLMMMGDGNIDPNEELSELHLSAVQEAMNQMMGHSATAMSNMFGEMIDITTPDIKVIALKEQLEDTNDQTMIKVGFDLIIGDLITSNLMQLIPVDKGRELAKRLLGDAVPEADPVKEEISLTAEELDVFLEVCNIGIGSASTVLSKLLNRKVSLQIPTARVIDSKEFEFNERPCLVTSVEFVEGLRSSNTFIISKNAALIMADLMMMGDGIVQEDAELTELEVSAVQELMNQMMGFSATAMSEMLGTKIDISPPTMEFCNFGDTMIQKNIEEGKTVEVIFPLEVDGLLKTPMYQIFNPAAAKEMAQLMLGIQAKEVAEKEATTPAEIIEPEKPAEPIKHTVIEEKETLSEMEQILEDIPVTLEVVFGTAKVKLEKFISWCEKDVIILKESMNEPLVLALNGVTIGKGILVRVDDHFGIQMTELVR

SEQ ID NO: 2591 - protein, 467 aa, Listeria monocytogenes
VRKLGLMTILFWMFLSVQAFAADLEPPMISLEKEQRVFTSGEVISFHVKNPEELKIVLVNEHGQRKLLDGETYTVTDWDLDGNYQAEFYQADISKPVVTVEDLFEVKQLEEVAKDETAPSLKMIEITHDEDVLPTSVLYASAELDDAESGVKQAILLVHSKSNESEMELIRNNYTGEFDAEIPLEKFQLGEELTFQLQLVDFAENEITLDLENTIQLYEPKAPVLSYDGSDITNVQKKIGQVGNRIELTLDKYTTEFPELETENGKTIPLLWQKTATEWKGSLALTTELSGEIIHIQEMNQYMLVRATSEPFGDIQLINNSILTGTIHPDFTFISNLYVEVNGQNFPIKRTDNSFTSAEITTTGKITLHWTDWDGQVFSKQMNQEIKPVIEMPDKETIAPPSVIPKEKESLLTSPDPKPSVESHENTPKKQEKKETSTKNKSSSIPFWIPALMIIGVIIFSGNRAMK

SEQ ID NO: 2592 - protein, 388 aa, Listeria monocytogenes
MKIDGIQESAENRNQLERELIKQNPVVKEGTIKAQMNTEVAVPKTPPVSFSFKELSSLQLNGTSAASLELYMKLMMNNAKKANDLIFYVMRAGIKNPTDSTKWQTVRSEISSQLSTILMKQHNFEAYFSENPANQKLFLANQKIMNEISFLLKMLPTLTFETTGKYDFLRMMQIASGNMETGIQMMREFQGHIEHATRLDSIVDARQETNWMIKVLREFGNMFQSRHLLPYELQAENINIWKLGSEYLKLMNQLLPQIGAFPNGNIKIFHQQATKPLTELFQELQRLADGQMTQGGIAVILDRMQGQLTRLAQLFQKMEIEAGFTDTERILGSVDAEFASDMTKMMLLAQQEMSFFDLLVKDFRSVSKQPIFFMIVAIFIILLLIILF

SEQ ID NO: 2593 - protein, 154 aa, Listeria monocytogenes
MNNVSIGQISQSKQTNVVRGIQELNQTQQLYFEQMKANGKKQTPSLTEINELITNVTDKKSLVEMDMTVDNVLSYKKAVQTFLNFYVNNVMDYDNIESRHPKYGFSQKMTILKQVEKQTNELDDVMNLIDTKTGHLDMLNRIGEITGMILDVVL

SEQ ID NO: 2594 - protein, 142 aa, Listeria monocytogenes
MQNELINQLEILIEKNVKATDEAILLGKLVQEENWIEAEERQLGLQRELAALQNEYQALKTIIGEDNTLRTVQNTWTPEENAIIDERKKMLLEKENLLRVSVTENQIRTEMQLAFSEHMVDVITGHHAETQAENNMMINETF

SEQ ID NO: 2595 - protein, 506 aa, Listeria monocytogenes
VRLSDFNTSLSGMSAAQIANMVAQQNISNMNTPGYIRQAVDQTAVYGDGGLLGGKQTGYGVKVTDIKRLTNTALTTQYNNQIAKQSASLYQSGALNQALNLFGTPGKNTPSDNLDNFFTAWAALAKNPDQATNTTALLSSMSIFTDQLNQLHSGLKELETTIAADTDAAIQDLNSLIKKLGSINKAIGNAGSNPPNDLLNQRDQLLSTMAGYAGISVSAHPNNPDVYDVTIGGRLVVQGDETTEITSTRTATGFEFSVDGQKLNMPEGSIIASVRVNQNEIKSYQEKIETFSNGLAKALDDIQVKNVNKTMDDLQKINDALQANPNDEKLLSNRDELLRQLEKFPGVTRSGDTLTIGGVDHPVDTLGTSTYVTDVNDFSIPIFAQSSGKWILNPAITSNADNKPFLGVIAADIASLKTDKNIQGTTFPSFMDGIITEVATDASKSSATATADTQALSSLTESKSSLEGVNIDEEMTNIMQYQSYYVANTKAMNTVNDMMKALLAML

SEQ ID NO: 2596 - protein, 291 aa, Listeria monocytogenes
MRISTNQQASSIINQLNNVSGNLAKYQLQVSSGKKYESMSENPGATAQILSYNHVLSQLNREKTDVTEAKSLLNTAETSLSSMSTSMNRVNALVLQAINGTSDKDNMSQSAEEIKGLLDVLISVANSEDDGRYVFSGSSTSVKPFTTDKTTGEIIYNGTTENKKFRVTDTLEVEVFHDGSAMTDVFNNIQKIVDAMKTGDKDALSALQETNSKNIEIITNSMTNIGGQKNGVTAYDNVLSSKIVDFSERKSNVEEVNMPEAVSNLNKTSIAYQAALQSSVMVQKLSILNYM

SEQ ID NO: 2597 - protein, 429 aa, Listeria monocytogenes
VGSSIASSLMDPTQYYSQFISLQKASLEKAKTPYQNQISSYQSRIDLYASLKNALSESLKTMSSFTTYESKTKLATSSNETSFTVSSTSSSVNGSYSIEVQNLATADTYNKAVPDIEAKIGVSGTIKINGKEIKVDADSSMKNVMNSINSAGAKVNIYTLGENMVVTSSTTGVENSIKFEGDSAVLDALGLVQNSPDHLAAEDAKLRINGATVTSATNKVTNYIPGVTINLKKETTGAEKLTIQDQSDEKAASMITSFVNTYNALTSTMKTYTGKGTILQASAADLEANRALNNVFQHKKDGNTLFDFGISVDKEGVLKVDETAMKKMVAEDPTAVERFFFGIGGIGDELYQSLNKTFGSTGFISDETTSMTNEINKLNLKLTDITSRNDTLLTNITDQYNKWLEMMQAMQSDAMTLDALIDGMNSSNK

SEQ ID NO: 2598 - protein, 128 aa, Listeria monocytogenes
MQAWKRYTQNELNTSNPIKNTIYIYERCIIEFKKLDKALAELHFSEADLILDKMEKIFEELKLQLNPEAGQELYDNIFGLYEWISEQIRQMQLLKQPVNIDTIIHVITQLKEGYEGVMKHESSKDTFG

SEQ ID NO: 2599 - protein, 93 aa, Listeria monocytogenes
MNQAKTHLAELKALFHSTGQLNVSLEEYQAKLNELLKSTEHLPKETKEAILKETRDVINKGILFTQKQLESTENAFSENKSRNAANLNYAKFF

SEQ ID NO: 2600 - protein, 133 aa, Listeria monocytogenes
VENYTTHIGNYLNYLQTANQVVSNNIANANTPNFKASEASFEESLGSSLRASGQNSAESAGNLTKTNTKHLAGTDIDETNAKVTTKSGSINEDGNNVNVTSEMISLTKNNQMYALAISALNYNSSINTAARGK

SEQ ID NO: 2601 - protein, 136 aa, Listeria monocytogenes
MFEGINTSGSALNAAKQWMEVSSNNIANADSSAAPGETPFLRKRVVLSEITPFETALTGTKGVKVSEISSDTGSVKRVYDPTHPNANEAGYVNYANVDMTAEMTNLMVGQKMYAANTSALQANEKMMEKDLEIGKV

SEQ ID NO: 2602 - protein, 98 aa, Listeria monocytogenes
MAIESINAASVLPKVTLGETAKTDNAAGAGNTFTQMLDSMSDTQSNAQTSVSNLLTTGEGNASDVLIQMKKAESEMKTAAVIRDNVIESYKQLLNMQV

SEQ ID NO: 2603 - protein, 550 aa, Listeria monocytogenes
MAKIKTMYSKLKNWHKGAILVGLFVVVTVLLLYMNTPKTEVTLYKNLSETSQQQVTDQLAKMGVDYTVDKSGNILVDEKVETLVRDKFADLGIPYTGQDGNDILLNSSLGASEEDKKMQEKVGTKVNLEKEIVQSYGTTIDSASVQLTLPESSSIFEEASQKGTAAVTLKTKNNQTLTSEQVLGIQRTVSAAVPNVASDDVAIIDTKNGVISEADTSKEEGSSAYKNEVDIQNAIGKNVKTDIEGTLSSIFALDNFRVNTNVAVNFDEIKQNTEHYPNDGKVRSNQKDTSTDTSKGSANTTESGTASNADVPNYTEQNGDDTNTYTSEKSSETTNYELDSTIQEIKKHPALAKTNVVVWVDQNALNKNGVDMAEFTKAIGVSAGLTPNMTTEEAGADGEAAAAPTFEGTFQNGDVTIMPIQFLDNATPAEKDTTEKAEPASKAWIWWLAGGLLFAVIAAGIITYIILLKRKEQLEEALEPEEKDYIPAEEAIINPEEHPDFNFQTDAFDLSEPELKARKESLKNKLGEMAKEDPGRAAAVIQKWLNERQE

SEQ ID NO: 2604 - protein, 368 aa, Listeria monocytogenes
MAETLKETLEETNAELETVEVVETEEKTTTSADSGISRREKAALIIWSLDEQIATEVVDLLPDASKQRLAREMAKMKEMDGGAVEEATREFLGELELLSGGIAKLDREHLQRLFPDMTTEELNQLIYGVEAESRIGETALDILREIDDVDSLFTIISDESPQTIAMIASYMKPEEASKLLALLPEEKMINTVIGIASLEQFDSEVMQNVSNLLRIKLDTMSNSSLNKTDGIKNVANILNNVTRGLERTIFEHLDAEQAELSERIKEKMFMFEDIILLDNMTLQQVLAEIQDNNKIARALKNEKEELKEKILSCVSKNRRDMITEELEVLGPIRLSDVEQAQQDIANVVKNLEKDGKIVIQRGEQDVLI

SEQ ID NO: 2605 - protein, 230 aa, Listeria monocytogenes
MSLSNPRIPKGKVTLSDVKMELFYLDDIEETEEIESPYSKELEQLESHQKELEKHLSAIEIEQQKLANEKAALQAERQAIEELRRDAEAEIEANKQAFEKEKTQIYLTITDFLWDESIDLAERIVHQAIDTRQIEVLPMLTEVIQKLPVAFDKLNVTTHPETLKALKEENTGTKYDWLLENIHWNFDMRLDYGEFTVEEEKEYFDYRITEIFQTLHKQNAERKILGGDKP

SEQ ID NO: 2606 - protein, 433 aa, Listeria monocytogenes
VSWSPKTEAWQELKNTVPYIQKGKIHTVQEQVYISKGPQVKIGDTVMVGENKVLCEVISIEKENNMLLPFNQSDKVAYGDWVYVTDTKITIPADEFLLGKVLNASGDILNEEAGMAKFKQKMPLEAPPIHAFSRAEITDTLETGIKAIDGMLTIGIGQKIGIFAGSGVGKSTLLGMIARNAKADINVIGLVGERGREVKDFLRKDLGEDGLRKSVIVAATSDESHLMQLRAAKLATSIAEHFRDQGKTVLLMMDSVTRFADARRSVDIAVKDLPIGGKTLLMESYMKKLLERSGKTQNGSITGIYTVLVDGDDMNGPVPDLARGILDGHIVLTRELATKNHYPAIDVLGSVSRVMEEIVPENQWKTASKIREWMSIYQENELYFKLGTIEQTSDNAAIFTSKEKSYFIHQFLKQLRDESVTLEETSKLMETLV

SEQ ID NO: 2607 - protein, 222 aa, Listeria monocytogenes
MNPVEQVISARQAEFQSVFEAAKQSATTFETKLNERLNETTTAKTTSVQTVTDAELARAREAYEALINQSETNSAAPTSSTTTETPTASTGELTNWNNYQIKPISAENEGKYSDLIKTAATKYGVPEALIKRVIQVESNFNPNVVSSAGATGLMQLMYGSNRTDPATNIDAGTKQLASYIKKYDGDLKLALAAYNAGPGNVHKYGGVPPFKETQNYLTKIIG

SEQ ID NO: 2608 - protein, 681 aa, Listeria monocytogenes
MMEKGIWKDALIQSTKKLSPKLQVKNPVMLLVYVGAILATSLYFLGFFGISDEKSGYTLAIALILWFTVLFANFAEAIAEGRGRAQADSLKMARKDVLARKLKNVDDKTDVIEVASNDLKKGDIVYVLANEQIPMDGEVIEGAASVDESAITGESAPVIRESGGDRSAVTGGTTLVSDWLVVRVTAVSGESFLDKMIAMVEGASRKKTPNEIALQILLVTLSIIFLAVSATLLPFTEFASKQAGAGSAISITNVIALLVCLAPTTIGALLSSIGIAGMSRLNQANVLAMSGRAIEAAGDVDVLLLDKTGTITLGNRKASEFLPVDGVTEQELADAAQLSSIADETAEGRSIVVLAKERFDIRGRDFAEMHAEFVPFTATTRMSGIDYQENTIRKGAADAVRAYVTANGGTYPKECDAIVSKVAGAGGTPLVVVRNNQVLGVIYLKDIVKNGVKERFLDLRKMGIKTIMITGDNPMTAAAIAAEAGVDDFLAEATPEAKLELIREYQREGHLVAMTGDGTNDAPALAQADVAVAMNTGTQAAKEAGNMVDLDSSPTKLIDIVRIGKQLLMTRGALTTFSVANDLAKYFAIIPVLFYGIFPQLEALNLMGLTSPTSAILSAIIYNAVIIIVLIPLSLKGVKYREMPAGKLLSRNMLIYGLGGLIAPFIAIKLIDMLLTVLGIV

SEQ ID NO: 2609 - protein, 214 aa, Listeria monocytogenes
MGNWQQKWESWRDMTAAMQQEIKIEAAEKVTSYIKNDQFEEAINVIRQTENLLNELDFETKMNRVEEQLQAFTSDQEAAKSFEASQLQNIEKPSTKVSFDLSHVKSEAINQFTKRDFNLVDSNDTHMQFLKGNRNFYMDIFNPEESEEYHYANLDEKCQYKNIGFICQNDAAAEIATKLTNEWLETLEAPKKKFLTVNIANLNAMKQNPEVLFQ

SEQ ID NO: 2610 - protein, 108 aa, Listeria monocytogenes
MKGLTELLKGSLEGMILERISRGETYGYEITKYLNDLGFDEIVEGTVYTILVRLEKKGLVEIEKKKSELGPPRKFYTLSPAGEEELAIFWKRWDFIQGKIMQVKGGQA

SEQ ID NO: 2611 - protein, 107 aa, Listeria monocytogenes
MFNWYKKYREEKRDYKQYKKRIAALPEDYKTAMKAIETYLWNFAKGAGMFEILKNVLEMFENAAADNLELKAVVGDDLAEFADNLLSEFPEETWMDKQRQKLRDSIK

SEQ ID NO: 2612 - protein, 215 aa, Listeria monocytogenes
MKEFIEPYQYNFIKNQLANVSRAYRSANDTSTLKALKSLTEEKINELFPESVLEEHKELFSKLHVITSTKEAEPFLEGLKAYVIPFAPPSDVKLKKLFAKTKKLKIPAWSKLDLRDYTFYGWNDIAQQRKYIVTYEDGNLVGVQGTISTEIQKGVCSICHSHSKVSLFMAKTKSSSDGVYTTNGNYICYDSDVCNEQIKAHETLDEFIEVVKKRK

SEQ ID NO: 2613 - protein, 576 aa, Listeria monocytogenes
MKKVKASETLVQTLKNWGIDHVYGLPGDSIDTVVDALRKEQEAIEFIHVRHEEVATLAAAAYTKLTGKIGVALSIGGPGAIHLLNGMYDAKMDHVPMLVLAGQVTTDVLNTGFFQEVNLPAIFEDVAVYNKQIDNAETLADVVDEAIRTAYKEKGVAVLTIPNDIPSQVIKASLEAKPVKFEQENPKLDEAAIQEAVTLIEKAEKPVILAGLGTKHAGPELIAFSEKLKIPIIHSLPAKTIVPDDHPNALGNLGKIGTKPAYEAMQETDLLLMFGNDYPYSDYLPKKTDCIQIDIDPAKISKRFPAIVGLVGDAAEIISDLTAKIAPVEERKFLQACQENMQEWWKWLEEDIAQTSDPIAPEVVMANIQKIADKDAVFSIDVGTATVWSTRYLHLTPENDFIVSAWLGTMGCGLPGAIAAKKAFPDRQAIAIVGDGGFSMVMQDFVTAVGLNMPMIVVVLNNQQLSFIKYEQQSAGELNYAIDLPDINYAKFAESCGGIGFRVEKMADLEAAFENAKLATKPVIIDVSVDSAAAPLPGKIVMDEALGYTKFEIQSVLEDHRFAKMPPLKTILRRFL

SEQ ID NO: 2614 - protein, 601 aa, Listeria monocytogenes
VNLIKNRKLKTKLSINIVITTIMLIGLGATSFLGFRHVATLSDNMVDNNVAPMKEIAKIQTNMAQINIDILTMFDTINGKSTLIKDIDNLYAENDQAIHNFKKANLTAEDKKQLAYFEEKLADMKASASSVISDTSSALDDAELLGAQNRYYQNVKTKFDDATKQLNVLNDMNYKEVENSSQAISDFGVKISLIFTAVIIAVLISLFIFNAYITRVILKGIRHLQTAVHKVASGDLSYRSTYNGRDELGDITNDLNEMSENLRLMIEDVKKASTDVKSSSDNVIISSEIISAMTTEMDIEMKMMGEQIQTQIGSMKESTDAMDQMTGGVQNVAEYALKVSDLTKDSAEKTNDGIAVINNLVSQMDRISGVMRSSTDVVSQLVNRVGEVEKALDTVTNIADQTNLLALNAAIESARAGEHGRGFAVVAEEVRKLAEQSRLAVVDINTVLKKIQTESKTTIEVMNTGLSESEAGQKIISETEATFTDLLNRVNDISAQMQNVSQETEEMAAGIEEVNTSISDVTEISNQIGEKSTAALEFAEVNKMKVDELVVISEEMQKISGSLEGYIANFNTEVSEEAVEVTEEPESETKDPGEPVLAENV

SEQ ID NO: 2615 - protein, 242 aa, Listeria monocytogenes
MRIWIKSLLVITACIFSLTLLNTKYTFYSPTVKLESAKVVYKLNNEPFNVRLDVPLVNQMDAPTLFNGCEVTSLAMLLQFNGKRVTKNELANNLSTTPIEQNGLHGNPDKAFVGSISGDSPGLGVNHAPIAKLAAKYVNEAHVHDISGNSIQDIITVLSTGAPVWIITTTDYHAPKNWQTVQTKEGKKKITYSMHSVIITGFDKNNFYINDPYGHKNRAVKRSVLEEGWSAMGKQAIYLSRP

SEQ ID NO: 2616 - protein, 484 aa, Listeria monocytogenes
MEHNKLKPFPKDFLWGSASAAYQVEGAWDEDGKGPSVWDEFVRIPGTTFKETNGDVAVDNYHRYKEDVALMAEQGLKAYRFSVAWSRVIPHGNGEVNEAGLKFYDNLIDELLSYGIEPVVTLYHWDIPQGLQDEYGGWESRKVVEDFTNYAALLFERFNGRVKYWVTLNEQNVFISHGYKLAYHPPGVSDDKRMFAANHNANLANASAIAKFRELGTSGKIGPSFAYGPSYSIDANPANVLASENSEEFNAHFWMDVYTWGEYPTATWNWLEEHGLAPEILPGDTELLKKGKPDFMGVNYYRSMTHAFNGKDGVGSGKMNTTGEKGTSEETGVPGLYKNTNNPYLEKTNWDWDIDPTGLRIGLRRITNRYKLPIMITENGLGEYDSLTEDHKIHDEYRIEYIRAHALAIQEAITDGVEMLGYCTWSFTDLLSWLNGYQKRYGFVYVDRDENDEKELKRYKKDSFYWYKKTIEANGANLVEEQGK

SEQ ID NO: 2617 - protein, 328 aa, Listeria monocytogenes
MDSAYVFDSEQATKLLMKNYELVKTSGVSFIDKRIRFLIARLFAGNNEVVNPERFNEINKEIKRQLGMFTALNGNVRASLVGLLMANNNASRESVQQVIANYNTLIQAGFQRTEYTYFAAYLLLESENPTKTAQKAKTIHQLFKKDHPFLTKSEDVTTAVFLANLPEENTTELAEVTEYYFQEFAAKGFRKNDSLQFLATTGTLLYGEKDSKFIRRVDNIVEELRQKGIKVKPIHYSSIGILAFVMDGRKIDSGLVNLIDELQQQPGLRFGREFVTALAISLYTEKQSGQMSKEQLEGLMVNVHILIAMEQAAAVSAAAAASAAAASS

SEQ ID NO: 2618 - protein, 100 aa, Listeria monocytogenes
MKKILLVCAAGMSTSLLVTKMKAHATSIGEEIEIEALPVSEASNVVDKMDIVMLGPQVRYQKPQVDELVQGRIPVIVIDMKDYGMLNGKAVLEKAFAEIG

SEQ ID NO: 2619 - protein, 450 aa, Listeria monocytogenes
MSIMSKFEHGMERVLVPVANKLNSQRHIAAIRDAFILVFPLIMAGSIITLINFAVLSPDGFIAKILFLGKIFPNLADAQAVFSPVMQGSTNIMAILIVFLVARNLAIFFKQDDLLCGLTSIGAFFIVYTPYTVVDNASYMTIKFLGAQGLFVAIIVAIITGEVFSRLARSPRLMIKMPDQVPPAVARSFKVLIPVIIITILFSVINYLITLIAPEGLNDLVYTVIQAPLKDMGTNVFSVIIIGLVSNLLWVLGIHGPNTVAAIRDTIFTEPNLDNLSYVAQHGSAWGAPYPATWAGLNDGFANYGGSGMTLGLLIAIFIASRRADYRDIAKLSLAPGIFNINEPVIFGLPIVLNPIMVIPFIITPAINTLIGYFFISTKLIPPVAYQVPWTTPGPLIPFLGTGGNWLALLVGLLCLAVATVIYLPFVLVSNKIAASDAAMDKNATASTEQ

SEQ ID NO: 2620 - protein, 294 aa, Listeria monocytogenes
MKIAAFDIGGTALKMGVVLPHGEIILTKSAEISGSDGDQILAEMKVFLAENTDVTGIAVSAPGYVNPKTGLITMGGAIRRFDNFNLKEWLEAETGLPVAIENDANCALLAEKWLGKGQDLDDFLCLTIGTGIGGGIFSNGELVRGGRFRAGEFGYMFSERPGAFRPGKYTLNETTTMLVLRRQYAELTGRPLEEITGEEIFANYDAHDAVSERLITEFYTGICTGLYNLIYLFDPTHIFIGGGITSRPTFIAELKHHMESFGLRDTIIETATHKNQAGLLGAVYHFLQEENRHE

SEQ ID NO: 2621 - protein, 102 aa, Listeria monocytogenes
MNEMETVIFGMISQVGSARSSYLEGLRAAREGNFEEAEAKLKEGGETLANGHHEHHKLIQKEASGEKVEIQLLLIHAEDLLITTETLREVVTEFVHVYKKIN

SEQ ID NO: 2622 - protein, 244 aa, Listeria monocytogenes
MFSYEVIRQFTETEHHLYRYIMDNRDKVMFMRVRELSEVTHVSPASIVRFTRKLGCEGFSEFKVKLKQEATREVKKKTADTVEVLEEFFERTMNRDYDHVLDAAAEIINEADLVVFFGIGTSGILAEYGSRFFSNMKKRTFYIKDPFYPNPGEQFKNKAVMIILSVSGETDQVLEQAQNMQQYGSRIISITNTSHNTLAGLSDVNIPYYVTQEMVDKTNITTQIPVLFLLEAMAKKNYNQEQEE

SEQ ID NO: 2623 - protein, 220 aa, Listeria monocytogenes
LTTETETIKPQLAELKANLTKRNLQYVMEVEKHLRETHYGEEQQEIIVYEMSEKILAEQKKGITARKLFNLTPTEYVVSLDVKAATVEQNTDKWWLVLDGGLLVLGAMMLISGISAYFQKNAQTLGIIVLLITAVVGGFAMLILRKYASNMRAGQKGGTIKYLLVAVGVIAVWMFVMTIVQVTIPPNINVALSPIVNTVGGAIIIALRFYVKKKKNIPSL

SEQ ID NO: 2624 - protein, 376 aa, Listeria monocytogenes
MFNRGLWYREWRNMRWMLLGVVILFFLGITLGLMSDADRWNSQKEYYESSEFLKQQKENPEFKTSDEEMKASLTVAYLTVPMYTNFVQDEFVDYMPFMFYFQVEMFFTLIKVSVFILGVLAVIFERYTRANRFTASLPYKRTHIVGVKMIMGIATIGLSYLISMGIGLTYFMSHVPKEYIQLDAPKFWVDIVGGLFTYILIFLVAILIGLLIGSPIAAAFVAFGVMLLPNVLNPTLDNMYNFIWPHGGDKGMSKLLRFEDYVNVFSPFSFESASFGAVIFSVILSVLMVVAILILYKKQHIERSGYLFAFSWVKWPFLVLFSLFVGMTAANLAVTDTELGFVGYLAWGIGATIGSFILALYILNKMRGLFQLSKTN

SEQ ID NO: 2625 - protein, 295 aa, Listeria monocytogenes
MKIRNLTKKMDDNLVLKDVSFDLKAGEITALIGRNGVGKTTLFSTMTGIYLPDEGDVFLDEESIFKHPEVKQQLFFLEDNMNHFNTYSVQTVVKIYRQIYTTFDEAFFNELMQQFELPMKAKLMSFSKGRKALFFIILAFSLNVRFLLLDEPLDGLDIIIKKQILATIKDTVKKRGTSVVIASHRLEELEAIADRVIVLKGASVELDYYLEDMRTDAVKIQVAFKTKKIPGFVKNNAQLLYRNGRIYTLLVTENASSFLAELRLEEPVLLEEMSISIEDIFTVHLANDKIDYYEI

SEQ ID NO: 2626 - protein, 776 aa, Listeria monocytogenes
MIKLDMTMLDSFKEDPNLRKLLFSGHFGLEKENIRVTSDGKLALTPHPAIFGPKEDNPYIKTDFSESQIEMITPVTDSIDSVYEWLENLHNIVSLRSENELLWPSSNPPILPAEEDIPIAEYKTPDSPDRKYREHLAKGYGKKIQLLSGIHYNFSFPEALIDGLYANISLPEESKQDFKNRLYLKVAKYFMKNRWLLIYLTGASPVYLADFSKTKHEESLPDGSSALRDGISLRNSNAGYKNKEALFVDYNSFDAYISSISNYIEAGKIESMREFYNPIRLKNAHTDQTVESLAEHGVEYLEIRSIDLNPLEPNGISKDELDFIHLFLIKGLLSEDRELCANNQQLADENENNIALNGLAQPSIKNCDNEDIPLADAGLLELDKMSDFIKSLRPEDTKLRAIIEKQKERLLHPEKTIAAQVKQQVTKEGYVDFHLNQAKTYMEETEALAYKLIGAEDMELSTQIIWKDAIARGIKVDVLDRAENFLRFQKGDHIEYVKQASKTSKDNYVSVLMMENKVVTKLVLAEHDIRVPFGDSFSDQALALEAFSLFEDKQIVVKPKSTNYGWGISIFKNKFTLEDYQEALNIAFSYDSSVIIEEFIPGDEFRFLVINDKVEAVLKRVPANVTGDGIHTVRELVEEKNTDPLRGTDHLKPLEKIRTGPEETLMLSMQNLSWDSIPKAEEIIYLRENSNVSTGGDSIDYTEEMDDYFKEIAIRATQVLDAKICGVDIIVPRETIDRDKHAIIELNFNPAMHMHCFPYQGEQKKIGDKILDFLFD

SEQ ID NO: 2627 - protein, 482 aa, Listeria monocytogenes
MSNTKFPDGFMWGGATAANQFEGGYNLGGKGLACADLFTGGTHTEPRRITAQLEESTFYPSHEAVDFYHHYKEDIKLMAEAGFKVFRMSINWTRIFPTGKEAEPNEEGLQFYEDVFNELKKHQIEPLVTIAHFDIPLALTNEVNGWASRDLIDYYLHFCEVIFKRYKHLVKHWLTFNEINTATMEIGNYLSLGIRHAEGDFLHQKDDPKVRYQALHHQFVASAKAVKLGHSINPDFMIGCMIAYMPRYPRTCEPSDVLLAKQTEAMHSHFCGDVHVKGYYPFYAKTFFKDNGIELEFDPEDEQILREGTVDFYTFSYYLTLCASNDPAYKNSGKSVIGGAENPYLKTNDWGMQTDPVGLRIALNDLYTRYNIPLMVVENGLGAFDKLEDDGTINDPYRIDYFKEHILQMHKAIQDGVDLIGFTIWGCIDLVSASTGEMAKRYGIIYVDKYDDGTGDYSRKKKASYYWYKDVISSNGEIGLEE

SEQ ID NO: 2628 - protein, 617 aa, Listeria monocytogenes
MDYNQLAKEILQAVGGKNNVNEVYHCITRLRFQLKDQSKVNEKQLKGLDKVMGTNVAGNQFQVIIGNDVPKVFDALAAENPAWKNKETTNKTTRQKGIKGFFSNIFDALSGVFAPILPAIAGAGLIKGFMALFVSLGWLATDTETYRILLAIGDGVFYFLPILVAVSAARYFKANMFVALGIGAALLYPDLTALLSAGTTPHFIGLPVTPVTYAYSVIPILLAIWIMSYVEKWVDRIIPTSLKLLFVPLITMFIVVPLTLVVIGPLGTFVGDGVSGGINWLLNNGGAIGGILIGGAMAIIVMTGMHYAIVPFVISNLAKYGYDKFLPLTYISNMSQAGATFGVFFRAKDKKLKSLAFSTGLTALMGVTEPAMYGINVVYKRPFMASLIGGAAGGGFAMMFGVKAYVLTGNGGIPGLPGLVGDTFVYALIAMALAFIVALIFSYIFGIDEQMVEATPVAEKIAAGTEILQAPVTGELVKMSQVNDTTFADEIMGKSIAIKPNEGKLYAPANGTIISLFKTKHAIAMKSDNGAEILLHVGIDTVKLDGNYFTAHVATGDVVEQGDLLVTFDMEKIAEKYDTTTMMVITNTNEYAVVEAKENGIVTKGNQVMELRSEQNE

SEQ ID NO: 2629 - protein, 279 aa, Listeria monocytogenes
LRIERILNNNIVSAISEDAQELLILGKGLGFNSKVGDPINESKIEKVFELKDDTMDKFKMIVNEIPIQFLEVTDDIVKLFKMKTAKDISDVIYISLSDHLYFATQRLQENVVIENPLSWEVKRFYQEEYAVAKEAAKMVESKLEIELPDAEISNIALHFVNAEVDSDMNDVTHIMQLIQEIISIIKYHFNIEFDEESTNYYRFMTHLKFFCQRVIIGETIDEMDEFLYQTVKKSRGVIFDCIDKIGVFLEKNYQFTMSHSEQFYLALHIERLLKRKNNQ

SEQ ID NO: 2630 - protein, 207 aa, Listeria monocytogenes
MIELVNVSKKIQDKLILEKVSLSIGAGEFIAVVGESGSGKTTLLNVIGHLDSKDSGQVIINEMEYQTKKEVMTLKKEVLGFIFQNYLLMENETVLENLSITGGENRKLMIEHLEEVGMDESYLAKKVYQLSGGEKQRIAIVRILLKPFQLLLADEPTGNLDDKNKQKIIELFLALKKQGKTIVCVTHDPEISAKADRIIYIEGGEIR

SEQ ID NO: 2631 - protein, 722 aa, Listeria monocytogenes
MKKFLSIIILVTLIIGNVMFFNFISNTLSRDFLFKEQTVVQFKYKEDYQVSDFNNSIKTFSETKNINIAQYTFLGERDLNIYGSNCQFAPNINLKKGDYPNKNQFLANEESVDKKQSGVIYHPSKYWSLKVYDFGQIKNVGLSDTFYVSGLDNQNTYQAFLKEFEQYGEVTTKSVDVSWWKYINIPLLMTLLLCFAILFVFTYYYLRYSKQRLLVNRIWGNSELVTLMSLFNKTIIFTLFSVLAILITFVSIVLANGLATYLVEIVWKLLLFNVLLFIFILFPMYFFGLLRIKKIDQAKSDQRMQSSRQHLAINLVIKFVLLCLFIGTFIASYQSLQTLNTRLANIDVWEATKDIFKVKVGVLPEGIQDDLKADKELNDNLSAFYEEGTSKKEMFLMYSNNFQRSETNTFFYETYLKKGSEINSPEGNSVEIDFNYLKLNPIKSIKGQNVGKEAIISDKVLNIIVPNSKKGLEKDIKNTFLDYFYFQKVEVANIYNEALDLPAVALSKEDLRVNIIYAENNQDYFSYDSNTGDFRTGNITDPIAIVYTGNIDSSSIGAHVTSSVYFVDKSNGDAFNAILPLISNSNAREITHVRSVYQEVSSEITTLKWQIYQQLIGTIILALCLCSFMVLLVLSYYRENLYKQLIYHVFGYSFWKSSKWFIISNLFVSVFSGILIFILSKEPVALYFSVVILIIELCAIYFIKEKAIYKDFKAILKGEKYD

SEQ ID NO: 2632 - protein, 131 aa, Listeria monocytogenes
MKKKVCVLAIALLTVLSPMGALAAQNLNEGETSLDSLMSANKTGEKVIFSETTTGKKPLLKAAQSAGGGTFWVTWGQDRHYSNYQHTKKTHRSSASNYRATERSSWKAKNNLATAWIKSSLWGNKANWATK

SEQ ID NO: 2633 - protein, 396 aa, Listeria monocytogenes
MEKNIETKKINLALLVCLVGFPQISETIYTPSLTEIAKGYGVSLNLAQMTLSIYFLAFAVGVFFWGVSSDFLGRRKAMNFGIFIYILGCFACLFSNNITMLFIGRFVQAFGASTGSVTTQTILRDNYHGNDRHHLFAKISAALAFSPAIGPLIGGFIGQYYGFRVVFLFLVVMGMILLFWSLKRLPETKTVNATSFSVQKIVVIGKKMIFDRYTIAFGALIGIFNGILFSYYSEAPTIFIERFHLNQSQYGFMGCAVAMATILGAWLSNWRLMQNSPHKIIKEGILLAIIGTLALSVVAIFPLTNQVILYILFISIILAGIGMALPNCLSLALVKFQEAAGTASAFLSLGYYVIVSLCTFFIGVLHSGSMLVFPSFCLVLLLIALLCIKIATRNNR

SEQ ID NO: 2634 - protein, 169 aa, Listeria monocytogenes
LIQLMVIAFFVVLLVIMPKNNKEERKAAHLLIDKYGIQVAKKNNPVRQMALLEVALGISTYRGSRKKTFIFIGGFFVIAFILGYLTYFFGINRNITATIIVGIILTLFLIAGTIIMFVIAIRQASSLRTDAWAKILTTIDPQFPVEFLNEKKWQKAFLAQMESMNEQLA

SEQ ID NO: 2635 - protein, 366 aa, Listeria monocytogenes
MALTAGIVGLPNVGKSTLFNAITKAGAEAANYPFATIDPNVGIVEVPDHRLNKLTELVKPKKTVPTTFEFTDIAGIVKGASKGEGLGNKFLSHIRQVDAICHVTRCFDDENITHVEGRVDPLDDISTINLELILADLETVEKRIGRVEKLSKQKDKDAVAEYNVLVKLREAFENDKPARAIEFNEEEEKIVRNLFLLTRKPVLYVANVSEEDVSSPDDNKYVQQVREFAASENSEVIVVCARAEEEIAELEDEDKLEFLEALGIEESGLDQLIRSAYTLLGLATYFTAGVQEVRAWTFIKGMKAPQCAGIIHTDFERGFIRAEVVAYDALLEYGSEQAAKEAGKVRLEGKEYEMKDGDVVHFRFNV

SEQ ID NO: 2636 - protein, 102 aa, Listeria monocytogenes
MEGMELASFQIISSVGAARSCIIEAMKLGRQRKFTEAYKKIDEANEFLSEGHKNHVQLIQKEADGGDVQISILFMHAEDQFMTTYTLRDVAYEMIAIWKEMK

SEQ ID NO: 2637 - protein, 756 aa, Listeria monocytogenes
MAVYLDKEKPVSERVEDLLSKMTLAEKCGQLNQRMYGWEAFSRDGETFQITEKFKEEVTRFEGIGALYGLFRADPWSKMNKDTGVSRKNAGKVANKIQRYVIENTRLGIPVLLAEEVPHGHQALDSESYPVNLARAASFNPELQKQVASAITEEISEKGVHLALASALDVLRDPRWGRAEECYGEDPYLAAELTAAITEGFQASGKIAVILKHFAAQGEPIGGHNSGPVSIGVRELREIFLDPMRAGIRSGALGVMAAYNEIDGVPCHANKELLTTILREEMGFSGIVMADGCALDRLLKLNPDPKKAAKMALEAGVDLSLWDEVFPFLEESVEKGILDEKIVDDAVSRVLQVKFQLGLFEQPFVEEDIQEPKSDWRQLNLQAAREGICLLKNDFETLPLVGEPKKIAVVGPSIDSLYNQLGDYTAPQNESECVTVLEGIKNQLPENWEVLSEKGAEIREELPDGIQRAEVVAKEADAIVMVLGGSSARNFDMEFLNNGAVSSKGPNMDAGENVDVADITLPQPQLDLFYAMKRTGKPVIVVMIQGRPIAIPEISLAADAILTAWYPGSLGGTAIAEVLFGHYNPSGKLPVSIPRSSGQIPIYYNQKAVEYKEDYFDLTGKPLYPFGYGLSYSTFEYQDLQIKQESIKISELLGGQSVEVKVTLKNISNVAGEEVVQLYIHDMEASITRRKKELKAFKKVRIAANQTTTVTFKLDKSSFEIWSINNKYEVEPGGIEIFVGGSSDTKLTGRVSIIGG

SEQ ID NO: 2638 - protein, 99 aa, Listeria monocytogenes
MKNIMLMCNAGMSTSVLVRKMERVVEERNLELTIWAISETDFEKNWRKADAILLGPQVNYMKDKVIDTVGDNVSVAVIDIVDYGRMNGEKVLDLAISLL

SEQ ID NO: 2639 - protein, 431 aa, Listeria monocytogenes
LKKFIEKLSWLSQKLGNQIHLKSMRDAFATILPFIMLAGFMVLINNVIIKPDGFMSAIISSETLTTWQGLGNSIVNGTLGIITILIGASVAYFLAQNRKFENPFAPALMTIALIVIFIPAVTEIVPIGAEKSVEVAGVLPIALMGSAGMFVGIVTALLATEVFIRLSKSEKMKIHISGDSVPPAVIKSFNVLIPTMLTILIFAFISFLVVTLFSLNLYSLISAIIQEPLTFLVTSVPGFLTLMTISQMLYSIGIAGSGILGPIMDPVLLANMQENMTAFANHTEIPHIINTTFRDVFGVMGGGGNTIALLLAIFIWSKRKDYREIATLSAAPGLFNINEPVVFGLPIVYNLSLMIPFIISTPLCLCLAYFATKLHMISEVVVMVPWTTPVVASGFLATGGDWRAAVFQIFLIGVCVLLYLPFLKANDRIKA

SEQ ID NO: 2640 - protein, 638 aa, Listeria monocytogenes
VSASKLSLPRWKQIVHMLYLKMEFISGGELGEALAVNPRTIRNDIKVINQILTIGGNRIESLPGVGYRLVIGDEKALREALLDDSVGRANMNIVPMFAEDRADYIIRYLLLKNDYVKLETLSEELFVSKSTINLDILEVKRKLKENELKVEKRAGYGIRITGAELAIRFCFSRYLLVESTSPLITETEINFFGEVNLEMMEQIVVSNIAKYNIHMTDISVKNLIIHIAIAVCRVKDNCYVPATDLEDIEFSMPELRAAQGIIKEIDLSEGIRFPESETAYLLLHLSSKNRKSDFNNYREYIIVDKMLAKIKELYGYDFKQDQKMISNIALHLKPAINRIKFNMNIQNPYLKNLKANYPLAFELGLVAKEVLEQELKTNVDEAEVGYLAIHFLYGLDKEIESEKQKVLIVCASGLGTSQLLESKVRKEFENTLEIVGVYSFKEYEQSGTMCDFVISTVPLRMKLHPFIQVSPFLTKADIRNITALMKQDETKNQFEVDKVFKESLFLISDKKDKEQVLVNLASLLLENNIVGEDYLPSLFEREEIVPTYLGNGLAAPHPIEANVQETAIGVCICVGGGVKWNEEDQAQVIFMLAVKNKQQQQLATVYELISNLVESPKAMGELKRVTSFEEFMRVLQTL

SEQ ID NO: 2641 - protein, 488 aa, Listeria monocytogenes
MTDRKNLTTNQGVPVGDNQNSMTAGRKGPTLIEDYVLIEKLAHFDRERVPERVVHARGAGAHGKFVTKKSMKKYTMAKFLQEEGTETEVFARFSTVIHGQHSPETLRDPRGFSVKFYTEEGNYDFVGNNLPVFFIRDAIKFPDVIHSLKPDPRTNIQDGNRYWDFFSLTPEATTMIMYLFSDEGTPASYREVRGSSVHAFKWINEEGKTVYVKLRWVPKAGIVNLSTEQASQIQAKEFNHASRDLYEAIENGDYPEWDLYVQVLDPKDLDSFDFNPLDATKDWFEDVFPYEHVGTMTLDRNPDNIFAETESVGFNPGVLVRGMLPSEDRLLQGRLFSYSDTQRHRVGPNYLQLPINSPKAPVANNQRDGHMPFKQQTSSINYEPNSYDTEPKENPAFIEPEQEIRGDISGRLIAEKPNNFGHAKEVWDRYSNAERAALVKNIVDDWSQVREDIKIRNLRNFYQVDPEFASRVAAGTGINLEEHVTDLK

SEQ ID NO: 2642 - protein, 327 aa, Listeria monocytogenes
MKTRVFGVLAGGALGDAMGMPTECWSQEKIRAIYPNGVETLLPSDESDAFGRKLAAGSITDDTINVLMIAEMIKKNNGQIRVEDYVAELVEWNANSGVSEFVSGPSTLRALKQISEGVPITKTGISGTTNGASMKIAPIGIIANYEDMEDLVSKVHQICLPTHNAKIAIQGASAVAAAISYVARGGNIVDKIWELAYEAIEVASNYGYDFPSASLKFRMDKAREIIGEETGPATALKRLYEEIGSGMETIETIPCAFAIVELAKGDPVEAAKLSACIGWDTDTIGAISAGICGGMSPTIPENYIEMIERVNNINLTQVSEDLYIHVL

SEQ ID NO: 2643 - protein, 561 aa, Listeria monocytogenes
MKYIVMQDVFFVVLLLVLAVPLGIYMYKVMIGEKVFLSRVLEPVERFGYRLMGVSEVGMSAKRYAVSVLAFSAVGFVFVMAVLMLQGFLPLNPEGMKGLSFSLAFNTAASFVSNTNWQAYSGETALSYFSQSIGLTVQNFVSAATGIAVLFAVIRGFIWKKQKTVGNFWQDLFRVTLYILLPLSLILALLLVSQGVVQSFADYSVVETLENGAKQLIPLGPAASQIAIKQLGTNGGGFFGANSAFPFENPSSFTNLIEMLAILLIPVALVVMFGRAVKDSKQGRAIMTAMMIVFVIGVVAITISEQFAGPSYQGVATSGSMEGKEVRFGVGGSSLFAASTTAASNGAVNAMHDSLTPLGGLVPMFFMQLGEVIFGGVGSGLYGMIGFIILTVFIAGLLVGRTPEYLGKKIEPYDMKMVCLLILVPPLLTLFGTAVAVMMPSVQASVSASGAHGFSEVLYAFTSMGNNNGSAFAGFAADTTFTNMVGAVMMLLARFIPLVAALYLAQNMAGKSSVAASSGTLSTKNGMFIGLLIGVVVLVGALSFLPALALGPIADFFTTFK

SEQ ID NO: 2644 - protein, 640 aa, Listeria monocytogenes
MGKYQALSKFILENVGGKENVLSVTHCMTRLRFTLKDDSKVNEDILKKSSEIMTAQFAGGRFQVVIGTHVSDVYNEIQGVTGADKIAEAEVKKTGLNRLIEIITKVITPVLGILTASGLLQGILALLTITNVIDVNDGGYIVLHAMGQAVFYFLPVVLGYTSAKAFNLNPYVGMMLGATLVIPELMTNLVTDKALYTLFDGTMFSTPVYNTFFGIPILFPPNGYQYTVIPVIFITFLGAKVEKILKKIVPPLLAHNLNSFLTILITFPLAILIIGPVTNVLSSLISAGVSGLYEVSPVITSVVVGLLYQPLVIFGLHWPMSAIGINNLAQYGVDYIFPMSFTASFAQTAVVLAVYLKTRSRNQKALAIPAMISGMFCIIEPAIYGFSLPVKKRFAFSMIGGAVGSLIISIFSVKMYAFAFGVLGFVSFINPANSSLGGLYVAIFATIVTMAVSFSLTFFTFKSSEDVVDEETKPLIKQQEVLAPIAGTMQPISSSADETFASKTMGEGVVIFPTGSKVVAPAAGVVTTVFPGGHALGITTENGTEILIHIGIDTVELNGEGFDVQVEVGSKVKQGQTLVNVDFEAIENKGYKSEVLVVILNTDDFLDIISEEKTTVKQGGKMLTLIPFNGKATNDMEVSY

SEQ ID NO: 2645 - protein, 276 aa, Listeria monocytogenes
LLRVKRVFNNNTILVHDSNGLEKIVIGKGISFNKRVGNIISEEAVEKTFIVDSPEITERFVQLIKEVPINHLDLTNKIIKDAESELNVTFDELTYLGLADHINYAISRYKSGHQIKNALLLEIKKFYPKEFNAAKNSVKTISYYENVKLLEDEAGFIALHFVNGQQEGIINNTLITTEVLKKVLLILEDTLSIKLDEESLNYLRFITHLRFFIERINSEGAREKEEPDMIEQVFKLYPKAYASVQIISDYIQETLNCTVYAEELMYLTLHVQRLIK

SEQ ID NO: 2646 - protein, 283 aa, Listeria monocytogenes
MAKGLGKGINALFNNVDTNEETVQNIAIKEIKPNPYQPRKIFDAKAINELRDSIKIHGVLQPIILRNTDKGYEIVVGERRYRAAKEAKLKEIPAVVRDLTEEEMMELSVIENLQREDLSPLEEAESYQFLMKKLSLTQAKLAERVGKSRPYIANFVRLLTLPEEVQVMLRDGSLSAGHGRVLLGLKLKKNIIPTAKKAVAQGLTVRQLEDVVNNLNENVSRETIKPARVPIFIRESESQLRDKFGTAVSIKRRDKKGKIEIEFLSDDDLDRILEILDIQFDDE

SEQ ID NO: 2647 - protein, 253 aa, Listeria monocytogenes
LSKVIALANQKGGVGKTTSSVNLSSSLAFLGKKVLLVDIDPQGNASSGVGVNKGEIEHCIYDVLVDDVAIQDVLQKTDLDNLNVIPATIQLAGAEVELVPAISREIRLKKAIDSIRDDYDYVIIDCPPSLGLLTLNALTAADSVLIPVQCEYYALEGLSQLLNTIRIVQKHLNEDLQIEGVLLTMLDARTNLGIQVIEEVKKYFQNKVFNTIIPRNVRLSEAPSHGKPILLYDAKSKGAEVYLELAKEVVAHG

SEQ ID NO: 2648 - protein, 252 aa, Listeria monocytogenes
VIHSTLGGITKRMAKIIFVKDEQNEFQAYDFLQNLIVEEPLMATLVFQGLLQIETAETRKLSTGKQILPDVHLIIGKSQAYSLQTTRVETTVDQPIQEMKAHFKDKNCRLIYFTAFSGDETYYCFVKGYFKDKNPFTDQMSSYREEVKRVFLRRIEAETSIGNADYQFETLKNKALENEGIAHYLESFSASLGKYIFSKRMEKKWSQLDLALKSDLSPVIIGRLEAGDPDLTLRMYQKVCTVLGVKATFSVD

SEQ ID NO: 2649 - protein, 99 aa, Listeria monocytogenes
VRFLKIIGHAVGVISCLMVLPSFVIAITSAILSFNPLYITYFFTSPYARAVAVAEESGWGSGFNILLVNYGAYLIAFGYTFFAIVKIYSWYQIAKEVKK

SEQ ID NO: 2650 - protein, 284 aa, Listeria monocytogenes
MPFSRLFGKKEKNQMDDIVEEGVQRVQELPMDKIFPNQFQPRTVFDQDKIDELARTIRIHGVIQPIVVREMEPDYYEIIAGERRFRAVLSLEMEKIPAIIQNLDDEEVAAIALIENLQREELTPIEEAKAYRSLLDMQDVTQEALAQRVGKSQSAIANKMRLLKLPETVQEAVLIKQISERHARSLLALETEEQQVALLAEIAENHWNVKQTEARIQEILGVKKQVATKKTKPKRQAISRDVRIAMNTIKQSVTMVKDNGMDLDFTEEETDDFYQITIQIPKKK

SEQ ID NO: 2651 - protein, 268 aa, Listeria monocytogenes
MTILNEIQQNYNRLPNKEKQIAKYILEKSDELKNINIKELAEETGTSISTITRFCRHVRCDSFVDLKMRVNTAATMVPSLGYDDLFEEVYSFYHKVIDNTVKLIEPAKIREVVQYIQEAKRVYICGVGSSGLTAVEMSQRLIRMGLNVISVNDPHMMIITSSITTKEDFVIGISNSGNTPELVTALKNAKKNKSKVATFTSFENSEMTEISDVTIPVYNTLFVSKRYFANSQFSIMYVMDIISMMLLQNESYRDNMEKTINTVTDEFH

SEQ ID NO: 2652 - protein, 101 aa, Listeria monocytogenes
MKTIMLVCSAGMSTSLLVTKMEKAAEAQGIEAKIFAVAEAEAANHLDEIDVLLLGPQVRFLEGNMKKKLEPKGIPLAVINSVDYGMMKGDKVLEQALELMK

SEQ ID NO: 2653 - protein, 301 aa, Listeria monocytogenes
MENYLCVDIGGTSIKYAKFNQEGKRVGELKSCVTPITGGANQIMPALIRIVEQEKTDVAGVCVASAGVVDSVKGKIIYAGYTIPKYTGTEIKAELEHRFNLPCAVENDVNAACLGEFWLGGARGCGSVLCLTIGTGIGGAMLLNDKLINGSSFTACEVGYMHLSQGRFQDVASTKALIKQVASRKNIEENALNGRQVMEWAYSGDADVLAEIEQWIENLVEGVVNLIYIFNPEVIVLGGGLMEEESFFKPRLKAAISTKLISPMFDTADITFAKLGNEAGMIGALYHFLNQKEAEKDDDFK

SEQ ID NO: 2654 - protein, 148 aa, Listeria monocytogenes
MLLDRVTLEDIEVNLKAEDWREAIQMSARLLLERGAIKESYIDGMIQSVENNGPYIVIAKHIALAHTRPEFGVIHGGLTFATLADGVAFGSDMFDPVKLIITLAATDSESHLEVLSELAEVLMDEEKVTRLIEANSSQAFYDELTKEG

SEQ ID NO: 2655 - protein, 218 aa, Listeria monocytogenes
MLKAIVMDFDGIVIDTEVVWYEIFKEWFKTKQNYDLSIEEFLQCVGSNVDDLFRELNEKNQMDINRQVFEAETQATFIENSKSLPAKEGVESFIRELKERGLKLALATSSQRPKPLYHLERLGLLEYFDAIITAEDVTRIKPEPDLFLEALRALDVKASESLIVEDSRNGLLAGNSAGVNVLVIPNEVTKHSDLTPNYLERESLAEVDLTEIMAEYNK

SEQ ID NO: 2656 - protein, 468 aa, Listeria monocytogenes
MSIRVHVQKFGSKLSGMVIPNLGAFMAWGILTAIGVATGSEMLKGFIAPMLNYLLPLLIAFAGGRAVHGYRGGVIGTVATMGAIISSDITMFIGAMIMGPLAAWILKKFDERIDGKIPAGFELLVNNFSIGIIGAGLALFSYVAIAPMVEAVTKVLASGVDVLINNHLLPLTALIIEPAKVLFLNNAIGQGILSPLATLQLAETGKSVLYLLESNPGPGLGILLGYMFFGKGNSKASSYGASVIHLFGGIHEIYFPFVLMNPILILPLILGGMTGTFILTMTNAGLVGVASPGSIITIMMMAAPGDHIKILIAVLCAALVTFITAIPFIKRMGNKDSELQDAAKKMEGLKGKKSSISSVFEAPVDDFNFKNVKRIAYACDAGLGSSAMGATVLQKKIKNAGLEDIKVFHIAIHELPTECDVVVTHKSLIDRAKEKQPDAYYVEITDYLGAPEYQELIDKIVADREQKN

SEQ ID NO: 2657 - protein, 333 aa, Listeria monocytogenes
MTKQIKVGVIGVGQMGQYHAEIYQKLPQVELVAICEYNDERRAEMAEKFQCKAYKDYHELLANTEIEAVSIVLPDNMHRDCVEEAVKYKKHILLEKPLAKELEDGKAMYELTKDYDKVFTVGFLLRFDPRFNMIKQRLDNGELGDIIHLYCRRNSPITGPKRYIGASDLSMHVMIHDIDYINWYMDSEPVKVIAKSRSVLLKEYGMNDVIYAIVTYENGAIACLEACWVLPENSPTIIDDKLELVGTKGVAYVDSCDHGVRFVSEKGVSYPDSRHWYYTNGEVSGDLAEEVMAFINNVANNTKSIITPKEAYDSLRVVDAIERSIAEGKEVSL

SEQ ID NO: 2658 - protein, 237 aa, Listeria monocytogenes
VGNSVMEKIKGGLVVSCQALEDEPLHSAFIMSKMALAAVQGGAVGIRANTAKDIRAIQSEIDVPIIGIYKKDYDDSDVFITPTLKEVREICETGVEIVAMDATTRKRPHNEDLKDILSAIRKEFPNTLFMADTASIEDVYYADSLGFDLIGTTLYGYTEETANKNISDDDFSHLKEVLKSTKRPVIAEGKIDSPSKARQVLTLGCYAVVVGGAVTRPQEITTRFTNEIQKIQEERGK

SEQ ID NO: 2659 - protein, 744 aa, Listeria monocytogenes
VLLFLTFHLSNDKRKNKQTKGGFIMKDGFLSKIASGVGGKKGRFITLGIWIIAIIILQFFFPKAADYKDDAAKDLPNSEPSVVAQKLIDDKFAGTDGVPALITWYRSTGLTNEDLVNIQKYSKELTENPVDYQKMAVPYDKMPPVALKQQVSKDGTTFIQTVIMKDSATSDQLTESFKQLESAAKTTIGEDPFAQKVSADDTLVARTTGPAGISVDASGLFKDADVSLLIGTVLLVLVFLLVIYRSPILALIPLIAVGFAYLVITPILGLLAKEGIITYGSQGLSIMTVLLFGAGTDYCLFLISRFRSHLHTEKNRFQAFKEAFSGTAGAIALSGLTVMAALLLLLAAEYGSFHNFAVPFSLAIFIMMISSLTLVPALLGIFGRVSFWPFVPRTVEMEETRAKKKGKTPKHHKENRFWHKIGEMSAKHPVRILIITLIILIGCGIFTTQVKYTYDTLSTFPEDMPSREGFTLISDHFGAGMLAPMEVVVNSKESMKSSLENVNGVASVTGPERSKGYQKYTLILKDNPYSNEAMDVVPKVRAAADKGNDVYIAGQTATQYDDRAVTEHDEKVIIPLVIALIAILLLCYLRSITAMLYLVATVLLSFVGALGLGWVIIHYAMGVEAISGLIPLYAFVFIVALGEDYNIFMISSIWKNSKKMPLRKAITEGVGQTGGVITSAGLILAGTFGVLTTLPIQLLVQFGLITAIGVLLDTFIVRPFLVPSITVLLGKWAFWPGKQHKMTK

SEQ ID NO: 2660 - protein, 202 aa, Listeria monocytogenes
MEKKRTRAEELGITRRKILDTARDLFMEKGYRAVSTREIAKIANITQPALYHHFEDKESLYIEVVRELTQNIQVEMHPIMQTNKAKEEQLHDMLIMLIEEHPTNILLMIHDILNEMKPENQFLLYKLWQKTYLEPFQQFFERLENAGELRNGISAETAARYCLSTISPLFSGKGSFAQKQTTTEQIDELINLMMFGICKKEV

SEQ ID NO: 2661 - protein, 132 aa, Listeria monocytogenes
LAASLKDRLEEEVKTYSADNNLTVQTIDFLYAGPHMRGRHSLVLAFTEAGIFTFVFKLSDAEMHFLDGKTVQQIVLEKKKLVYRLYIRAVTEEGELEEGKYLVSKRVLGRKWHKETLEKLINKNLPLLTATK

SEQ ID NO: 2662 - protein, 111 aa, Listeria monocytogenes
MGEQNYIETRNGRTSFFDGGLLQYIGWTILGTLVTLCTFGICYPWALCMVYGWKINHTVIEGRRLKFQGSAVGLFGHWIKWLLLTIITIGIYGFWVFIKLEDWKVKNTIFN

SEQ ID NO: 2663 - protein, 478 aa, Listeria monocytogenes
MKKMTKIGMFFAVFTLAVVLFQTTASAHGYISKPASRVYLANKGINVGVGSAQYEPQSVEAPKGFPISGPADGSIAGGGKYSLLDEQSASRWAKVDIESGPLTVEWTLTAPHKTSSWQYFITKKGWDPNKPLTRSSLEPLATIEADGSVPNALAKQEINIPNDRSGYYLILGVWNIADTGNAFYQVIDANIINSDITPVADTEAPTKPTNLAATTTTKTVSLAWNASTDNVGIKGYEILRDGVVIGESQTASYEDTTVESNTAYTYTVRAKDFAGNKSTLSNSINVTTKEVPAVDNEAPTAPKSLMSHGQTDTTIALCWQASTDNVEVKNYEIYRNNTKIATSTKTMFEDTKLASNTSYNYKVYAVDTSGNRSLVSNEITIKTKTLDPLNTWKSDQIYNAGDQVYYNGVAYTAKWWTKGNTPDTSDVWQTASTDIQTWNVQKAYNGGDKVTYNGKTYQAKWWVRGEKPDSSSIWTLLN

SEQ ID NO: 2664 - protein, 198 aa, Listeria monocytogenes
MNLIPTVIEQTSRGERAYDIYSRLLKDRIIMLGSAIDDNVANSIVSQLLFLDAQDPEKDIFLYINSPGGSISAGMAIYDTMNFVKADVQTIGMGMAASMGSFLLTAGANGKRFALPNAEIMIHQPLGGAQGQATEIEIAARHILKIKERMNTIMAEKTGQPYEVIARDTDRDNFMTAQEAKDYGLIDDIIINKSGLKG

SEQ ID NO: 2665 - protein, 463 aa, Listeria monocytogenes
MTKVNSFFRKKSFHNPATDKHHLNKSLGAFDLTMLGVGAVVGGGIFILPGQVASVIAGPGIIISFIIAGIACCLAALCYSEFASKLPVAGSAYTYSYHVFGEGVAWILGWSLILEYGLAVAAIASGWSSYMKSLLAGFDLHIPTAISSAYDPSAGTYFDLLAFVVVMVIGILLSFGIRESTRVNNIMVLVKIAVVVLFILVGAFYVKPDNWTPFLPFGVQGVITGASTVFFAYIGFDAVSSAAEEVKNPQKNMPIGIISSLAVCTLLYILLSAVLTGVVPYTDLVDVSAPVAFALQAINQNWIAGLLSVGAIVGMTTVVLVMSYGGTRLLFAMGRDGLLPKSFSKISKNDTPVRNTMIFATVMGLIASTVPMADLAQLINIGTLFAFAMVSIGIFFLRRNPDLNQKGFKTPFYPVVPALSFLLCVYLMINLSKTTWIAFGIWFVIGILVYTFYGRKHSALRIK

SEQ ID NO: 2666 - protein, 338 aa, Listeria monocytogenes
MSKLFSEYKLKDVTLKNRIVMSPMCMYSVENKDGIATDFHFAHYVSRAAGGTGLVILEATAVQEVGRISEFDLGLWNDEQVPALKKLVGGLHYHGAKAGIQLAHAGRKAVLPGEIVAPSAIAFDEKSDKPVELTKEAIKEVVADFKRAAYRAKEAGFDVIEIHAAHGYLIHQFLSPITNRREDNYGGPAGNRYKILSDIIKAVKEVWDGPIIVRVSATDYAHGGLQLEDHIPFAKWMKADGVELIDVSTGGLVNVAPPVFPGYQVPFADEIRRGAGIATGALGLITRGEQAEEILCNERADLIIVGRELLRNPYFAKDAAKQLGETIEAPKQYSRAWK

SEQ ID NO: 2667 - protein, 323 aa, Listeria monocytogenes
MSFASETKKELTHMDVSDSDAKVELAAFIRMNGAISFSSQLVIMDVQTENAAIARRMYQLLKDLYEVPIELLVRRKMKLKKNNVYIVRLKSGTRGILEDLRILEPPMTFTKSIDRGFVKKRSAKRAYLRGAFLASGSVNNPETSSYHLEIFSVYEEHNEAICALMNQFDLNARTLERKNGFITYLKEAEKITEFLSIIGATSALLHFEDVRIMRDMRNSVNRLVNCETANLNKTINAAVRQIDNIKYIQSTVGLEALPERLREIAALRIANEDVTLKELGEMLTTGQVSKSGINHRLRKLDQIAERLRSGETPAQVGLKISNS

SEQ ID NO: 2668 - protein, 322 aa, Listeria monocytogenes
MKKETKPRVVVIGGGTGLPVILKGLKKKDIHLTAIVTVADDGGSSGKIREQMDVLPPGDIRNVMLALSNVDPRVVDLFQYRFAVDGDLSGHVIGNLILTALSQLNDSYVDAINVLATVLKIRGKVIPATDQPLILNAEMEDGSIVHGESLIPLQGKHINRVYIEPENVKPYPTAVEAVKEADLIVIGPGSLYTSILPNLLLTELADEITASKAPKVYITNILTQIGETDFFSDADHIKVIHEHVGKSFIDKTLINTTTVPKELLFPEDVAQVEHNAKGMEELGVEAIYQDFLSTEDGLVRHAAEKVADALLAMLPNQTNEKE

SEQ ID NO: 2669 - protein, 291 aa, Listeria monocytogenes
MASKQLKLVIITGMSGAGKTVAMQSLEDLGYFCVDNLPPSLLPKFWELMKESDKMDKIALVMDLRGREFFDSIEPALDELDNTNFITTKILFLEADDKVLVSRYKETRRHHPLEPNGSVLDGINAERELLSDLKGRSQLVINTSNMAPRELRERINNEFQTEDKDIFNVQLMSFGFKYGIPIDADLVFDVRFLPNPHYIDKMRPLTGLDEDVYEYVMKWPETQTFLDKLVDLLMFTLPFYKREGKTQLVIAIGCTGGQHRSVALTEFVGKTIQQKYETTISHRDMKRRKGR

SEQ ID NO: 2670 - protein, 576 aa, Listeria monocytogenes
MNWQEEYQKWVANDKLDSTLRKQLTNMETNEKELEDSFYRNMEFGTAGMRGVLGAGTNRMNIYTIRKASLGLAQFVAENGEEAKKRGIVIAYDPRHMSREFAFESAAVLGHHGVKSYVFDALRPTPELSFAVRHLNAFGGIVITASHNPPEYNGYKIYGEDGGQMPPTGASAVIEYINAVEDIFSVEVANQELLIENGLLEVISEKVDRPYLEKLKEVIVNKELVQERGEDLKIVFTPLHGTGGILGVPALESVGFTNIVKVDEQFVNDPDFGTVKSPNPENREAFLLAIEYGKKFGGDILVGTDPDADRLGVAVRNADGEYEVLSGNQIGAIILHYLLKQKKAQSELPANAAVLKSIVTSNLGTEIAKHYGAEMIEVLTGFKFIAEQIKHFEETGKHTFEFGYEESNGYMVKPFTRDKDAIQAVLAIAEVALVSKVAGRTLLEDLDQIYDEFGYYNEDLVSLTLSGKDGSERIKEITSSFREQLPTSMGGFVVERAEDYLRSETTWIATGKTEAIHLPTADVIKCYFEDGSWFCLRPSGTEPKIKFYFSIRGESKEESTAKLEKVKADLMQHIEA

SEQ ID NO: 2671 - protein, 353 aa, Listeria monocytogenes
VIFIEVMKERFGEFEGETVWKWTMINDHDMRMSVLNYGAIVTSLETKDKFGDFANISLGFTNLDDYLAHSPYFGATLGPVAGRITNGQFSLDGKQFQLIQNEGSNHRHGGKFNFSKKLWDVSVEKSLDQIVMTFEYCWADGENGYPGKIDAKMTYTLNNKNEWLVDYEARSNQPTIYNPSNHIYFNLSGEAGSTVLQHQLWVNSDSFLPIDEEFLPIGEKRLAENTIFDLRAGREVAEITQSQDQQVKLVGAGLDHTFILKHENGRPDAVLFDPKSGRRLEMETKADSVLIYTANSLDGSFEIDERAVPKYAGITMETQGLVDAINHEGFGDIVLRPEKPFTSRTAFRFTVES

SEQ ID NO: 2672 - protein, 327 aa, Listeria monocytogenes
MGIAVLGGAGYIGSHAVDELITRGYEVVVIDNLRTGHRESIHKKAKFYEGDIRDKAFLSSVFEKEKVDGVIHFAASSLVGESMEVPLDYLNNNVYGTQIVLEVMEEFDVKHIVFSSSAATYGEPERVPITEDMPTNPESTYGETKLIMEKMMKWCDKAYGMKFVALRYFNVAGAKADGSIGEDHKPESHLVPIILQVALGQREKLAIYGDDYNTPDGTCIRDYVQVEDLIDAHIRALEYLKNGGESNIFNLGSSNGFSVKEMLEAARTVTGKEIPAEVVPRRAGDPGTLIASSDKAREILGWEPTYTDVKDIIATAWKWHVSHPNGY

SEQ ID NO: 2673 - protein, 319 aa, Listeria monocytogenes
MASEEKIYDVIIIGAGPAGMTAALYTSRADLDTLMIERGVPGGQMVNTAEVENYPGFDSILGPDLSDKMLSGAKQFGAEYAYGDIKEVVDGKEFKTVTAGSKTYKARAIIIATGAEHRKLGAAGEEELSGRGVSYCAVCDGAFFKNRELIVVGGGDSAVEEGTYLTRYADKVTIVHRRDKLRAQQILQDRAFKDEKVDFIWNSTVEEIVGDGKKVTGAKLVSTVDGSESIMPVDGVFIYVGLVPLTKAFLNLGITDDEGYIVTDEEMRTNLPGIFAAGDVRAKSLRQIVTATGDGGLAGQNAQKYVEELKESLEAEAAK

SEQ ID NO: 2674 - protein, 491 aa, Listeria monocytogenes
MEKDKKIPAKIYPFYPNGQFYFERGVEAFRDQRIKEAIRYLVRASELEPGEAVILCQLAICYTEIGQFHKSNQLLREVLEQRNGNMEYCYYFIANNFAYMKDYRRALQYANRYLDSSTDGEYTEEAKDLIEVLLEETPFGETIENGFSKLEQEFYSYKKEINRYLAEEDSASACDILRKVIDEKPNFWPAYNQLASLYFEQLKEEEGVRVLSDLLSRNPGNLLGICDLFIYHFYKGNRKEADELYLELRDVLPVLAHHKEKLGLIHAMMGEYEEADDLLEQVADLEVTERSKYYYFRAKSSYYLGDVEGAKMFWHSFLECDLYEDVRFPWEQEPDLTNDTRLVLEMLQEEDDLTHMLGVYALTISGNRPELVLFHPLLDMSDWSYMEHLMFTNFDYFPDGAIEQNGYLIAKAMIILKENGILLNEEYMALYKQMFSLVLIDAGKDLILGRYTIETVASAIAKLFLPHLKLQLVEEFECSKCARDIERVLSR

SEQ ID NO: 2675 - protein, 165 aa, Listeria monocytogenes
LRRLDRFNAPDDTVNTLFQVYKTISFWKVLKNTLVIEFGRFFPWMGGKRKIYRVCLGMEIGEKTAIAYKVMPDLFFPEKILIGENSIIGYHTTILTHEYLLSEYRVGEVVIGRDVMVGANVTILPGTVIGDGAVIAAGAVVSVDVPAGSFAYGNPLIIKEKATLT

SEQ ID NO: 2676 - protein, 217 aa, Listeria monocytogenes
MTGKITTLLFDLDGTLINTNELIIKTFQVTLQEFLPDRVFTREDILPFIGPSLMETFREINPAHADEMRAFYREYNLKHHDDLILEYDGVYEAIRALYEEDYKLGIVSTKMYDTIMRGLKVTGLDKFFQVVIGLDQVSNAKPDPEGIEMALSLLNATKEEAIMIGDNYHDIEAGKNAETLTAGVAWAIKGPEHLAQFQPDFMLEKMSDLLAIVRDEE

SEQ ID NO: 2677 - protein, 277 aa, Listeria monocytogenes
MGNGVQPLDPVAIQIGSISVKWYGVIIASAVVIALLLALSEANKRKMDKEIIVDLLIWAIPISIISARIYYVIFEWDFYKNNLGEIVKIWHGGIAIYGALIGAVLTAIIFSRIKKISFWQLADVVAPSLIIAQAIGRWGNFMNQEAHGAETTRSFLESLHLPDFIINQMYIDGAYYQPTFLYESLWNVLGFVILLIIRRTKIRRGELFLGYVIWYSFGRFFIEGMRTDSLMWGDFRVSQALSLLLIVLSIGIIIYRRLKMNPPYYMEDKFGKVVKKK

SEQ ID NO: 2678 - protein, 435 aa, Listeria monocytogenes
MNGFIAFMEKYFIPYAAKIGGQRHLVAIRDGFITTMPLMILGSFAVLINNFPIPAYQKFMNNLFGEGTWQAFGGNVWNGTFAILALLIAFTVAYNLAKSYDKDPLSSAVVSVATFFTIGAIAPGADGIANTGGLGSTGLFLALIIAILSTEIFTRLSGSPKLIINMPDGVPPAVSRSFAALFPAMITVSIFGLITAFFQAAGVTNLVISFYELVQEPFMGLANSLPAALLLAFVSAFLWFFGLHGANIIDPFMQTINIPAIEANVKALEAGKELPYIVNKPFFDSFVNLGGTGATIGLIIAIFIVARKHKAYMTVSKLSAAPGIFNINEPMMFGLPIVLNPIMFIPYILAPLVLVTVAYFATAIGWVPACTIVTPWTTPPIIGGALATQSIAGGVLAAVNLGLSILIFLPFAKIAQIQELRREKEALAAEGVTAE

SEQ ID NO: 2679 - protein, 312 aa, Listeria monocytogenes
MTKSVTVKDLKERLNLELICSETGLERPISTSDLSRPGLELTGFFSYYPEDRVQLFGMTEISFSEGMEPEERLKRYKQMCTKRTPAFVISRNLEVPKELVAAAKEADIPVLRSRLKTTRLSVYITNYLESRLAPVISMHGVLVDIYGLGVLITGSSGVGKSETALELVKRGHRLVADDNVEIRQEDEMTLIGSSPAIIEHLLEIRGLGIINVMTLFGAGAVRSSKKITIVVHLENWDPDKHYDRVGLDQEKTKIFDMDIPKITVPVRPGRNLSVIIEVAAMNFRLKNMGYNAAEQFTQDLNNLIGHNSSMND

SEQ ID NO: 2680 - protein, 117 aa, Listeria monocytogenes
MRWIIGVIINSVLFVALSGFFTSFHVDGFTTALLASFILAILNMLIRPILLLLTLPINIFTLGLFTFVVNAIMLEMTTFFIGDSFQIDGFGTALILAAIMAFANMIINSVLWGNKEN

SEQ ID NO: 2681 - protein, 403 aa, Listeria monocytogenes
MEKKLRRSRVDRKVGGVFGGLAEFLGIDATLLRLIYIIITIITMKTGIAIIAYIVALFVIPSSDTSNEEVLERHRRRVEEKRNRHAGRNQARQEVREAMRNSHHHRRQRPENAEPIHHGARKKEARPRPVREFNFDNATFRSFTIRVATGDVIIRSWDKEQMKIRAVLAVHEKARSIRQLSEEKLWDYFFSQTMLDISPDNFTFESKNELLKTDLVITIPKRLYEQVKIQLLNGNLKYDDTAAEDAIIKTRHGDIRSSGASGKFLSTESADGEIFFKRSTVENVDMSTAKGDIALQGSFLTTIAKAAQGDVEYILENDTSSAADLEAPNGDIRIQIPPTWNVDGTLGTKKEKIYFDLKNAKIWDDADRTFVFTQNAEEISMATLQAKVGNGIIKVSELETKNV

SEQ ID NO: 2682 - protein, 420 aa, Listeria monocytogenes
MENERKRILELVKQGIISTEEALTLLENISKKEGKTAAKENIRRSAAPREEEQIEEETKEEPSYDYSKGWNNQGNPYTPPKSRKRRPEPTPENHERDEEEGGENSSKDREDSMRNMVNDLSQAGEKIGSFLNSAFKQVKDMPFPFLTSTKIERDFIYHDTTLSILEFEIANGNIEFKPSDSNDIKVHAMIKLFKEYPEDEALKIFFDKTTLRVDEETLRFESKSKQIVTNLTVYLPRREYDYVSVKMLNGNFHMDELSGRDLFVKTTNGNISIGTLNATLAEIESINGNVRIQNGEIRDVALKTFNGNVAVKGNYYSTNLQTKNGNVNYQLTGNEATFLKAKTGAGNIDVVVPATIGVDGRFHTNLGKLLLDLKDAEILESKTESVSKSITFTKLPNAADSSLKIEAEATTGSVKIRDVK

SEQ ID NO: 2683 - protein, 956 aa, Listeria monocytogenes
LDKEKIVIQGARAHNLKNIDVEIPRDKLVVMTGLSGSGKSSLAFDTIYAEGQRRYVESLSAYARQFLGQMDKPDVDLIEGLSPAISIDQKTTSRNPRSTVGTVTEIHDYLRLLYARVGHPVCPNHGIEITSQTIEQMVDRVLEYPEKTRIQIMAPIVSGKKGTHKKTIEEIKKEGYVRIRVDGEIYDINDEIEIEKNKKHSIEIIIDRIVIKEGINTRLYDSIEAALRLADGYAVVDIMGDKELLFSEHYACPYCGFSVGELEPRMFSFNSPFGACPTCDGLGTKLEVDVDTVIPDRSMSLNEGAIIPWRPISSQYYPQMLASACKEFGIDMDTPLEKLSKEELDIILNGSKDKEFYFEYKNDFGMTRETWIPFEGILPNIERRYRETNSDFTRDQMAQYMTDLPCPSCKGYRLKEETLSVKVNDHHIGQISEFSINEALAFFDGLELSEKETQIAAPIFKEVRARLGFLKNVGLDYLTMSRAAGTLSGGEAQRIRLATQIGSRLTGVLYILDEPSIGLHQRDNDRLISTLQSMRDIGNTLIVVEHDEDTMMAADYLIDIGPGAGEHGGRIVAAGTPEEVANNKNSITGDYLSGKKFIPVPAKRRKGNGLELEIIGAKANNLKNVNAKIPLATFSCVTGVSGSGKSSLVNEVLRKALARKLNRNHAKPGEHKEIKGIENLEKIINIDQSPIGRTPRSNPATYTGAFDDIRDLFASTNEAKVRGYKKGRFSFNVKGGRCEACKGDGIIKIEMHFLPDVYVPCEVCHGKRYNGETLDIRYKGKNIAEVLEMTVEEGLEYFTNQPRIARKLQTIVDVGLGYIRLGQPATTLSGGEAQRVKLASELHKRSNGKSFYILDEPTTGLHADDIGRLLKVLQRLVEENGDTVLVIEHNLDVIKQADYLIDLGPEGGDGGGQIIATGTPEKIARSKKSYTGKYLKPILERDKERTEERIATAKKK

SEQ ID NO: 2684 - protein, 100 aa, Listeria monocytogenes
MDLEQTIMSLIVFGGNAKSDAMLAIDSAKKGDFAQADEQIAQAEQALLEAHHSQTKLIQGEARGEKTEVSLLLVHAQDHLMNAITFKDLAKEIVDLYKNK

SEQ ID NO: 2685 - protein, 658 aa, Listeria monocytogenes
LKDKFELVSKYSPQGDQPRAIEQLVAGLKKGLKHQTLLGATGTGKTFTVSNVIQEVNKPTLVMAHNKTLAGQLYSEFKEFFPNNAVEYFVSYYDYYQPEAYVPQSDTYIEKDASINDEIDKLRHSATAALFERRDVIIIASVSCIYGLGSPIEYGEMLVSLRVGMEISRDQLLRKLVDIQYDRNDIDFQRGRFRVRGDVVEIFPASRDEHCMRIEFFGDEIERIREVDALTGEIIGEREHVSIFPASHFVTRPDIMKKAIVNIKAELEDRLKVLRADNKLLEAQRLEQRTNYDLEMMEEMGYCSGIENYSRHLSLRPAGVTPYTLLDYFPDDFQMVIDESHVTMPQIRGMFNGDQARKQMLVDHGFRLPSALDNRPLRLEEFEKHINQIMFISATPGPYELEKNPDVIEQIIRPTGLLDPIVEIRPIQGQIDDLMDEINDRVEKNERVLITTLTKKMSEDLTNYLKEAGVKVQYLHSEVKTLERIEIIRDLRLGVYDVIVGINLLREGIDLPEVSLVAILDADKEGFLRSERSLIQTMGRAARNENGRVIMYADKMTDSMRNSIGETERRRKIQIEYNEKHGITPKTIKKEIRGIIAATSAADEREAVKQHDLSKMSKKERDVFIEGMEHEMKEAAKALDFERAAELRDALLEIKAEG

SEQ ID NO: 2686 - protein, 215 aa, Listeria monocytogenes
MGIHQYFQSLSDLENIYRCPGKFKYQEHSVAEHSYKVTSIAQFFGAVEEEAGNEVNWRALYEKALNHDYSELFIGDIKTPVKYATTELREMLSEVEESMTKNFIEREIPETYQPIYRHLLKEGKDSTLEGKILAISDKVDLLYESFGEIQKGNPENIFVEIYSEALATIYEYREMASVKYFLKEILPDMLAEKGIEKTELPQLTTEITTKALRDA

SEQ ID NO: 2687 - protein, 128 aa, Listeria monocytogenes
LKKLSPMQKFIVITGIIVMTIIAILAVIWNNNLTVVIGLSIVQFIMIQLVCYVGIYSHMKVGTARGTKLFSWGILTTLLFSAIIFIFATDNFRTYSAAMIALIGYAAALMMREIENTNPANKKQKREE

SEQ ID NO: 2688 - protein, 101 aa, Listeria monocytogenes
MENAKQPLDEETLFSVTQIFKALSDPTRVQILNLLQDREYSVNEIARTLAFNQTTVSHQLRFLKNLRLVKSRREGTTIYYMQDDNHVLELLTQAIRHVHHH

SEQ ID NO: 2689 - protein, 219 aa, Listeria monocytogenes
MVVRKIFTEQLNDLHQHLMEMGMLANEAIFKAVKSLVHRDTELAKQVVAEDKAINNMELSLEQRSFELIALQQPVGMDLRKIVTVLKTSSDLERIGDHAVSIAKTAILIGESKVLKPIPEIPEMGEIVKSMLQDVLKAYLAEDEGAAREIAERDNEVDKLHKIVYQKCIHFMQEEPEHIEDVSQLLLVSQYIERIGDYVTNVCEWIVYLKSGEIEDLNR

SEQ ID NO: 2690 - protein, 259 aa, Listeria monocytogenes
MTTETAEKVEYIIETKDVDLFYGSKQALQKIALNIKKNQVTALIGPSGCGKSTFLRTLNRMNDLIPNVKTTGEIHIGGENVQDPKIDMVNLRKKVGMVFQQANPFPFSIYDNVAYGPRMHGIKDKKVLDEIVERSLRQAALWEEVHDRLDRSAIGMSGGQQQRLCIARVLAVKPDVILMDEPTSALDPISTAKVEDLILELKKDYTIVIVTHNMQQASRISDETAFFLNGRIVEFADTTSIFTNPAEKETEDYISGRFG

SEQ ID NO: 2691 - protein, 271 aa, Listeria monocytogenes
MLTKKPEINTILQVTPDPHSLPAAMATEDLHVYYGDNHAIKGVDLTFPENKVTALIGPSGCGKSTYLRALNRMNDEIDGCRMEGQILYDGININRKEVDLYNVRKEIGMVFQKPNPFTKSIYENVAFGLKRHGMKNKKEIMERVEKSLRRAALWDEVKDDLGKSALSLSGGQQQRLCIARAVAMQPKVLLLDEPASALDPISTSKIEDLINELKNKYTIIIVTHNMQQAARVSDYTSFFYLGEVVEFSGTSELFTNPQEKQTEDYISGNFG

SEQ ID NO: 2692 - protein, 294 aa, Listeria monocytogenes
MNVKTKDKIATGVFYAIAVLIVIILAGLLGYILVKGVPQLSWKFLTTPPQSFQAGGGIGPEIWNSFYMLVITMIISVPISLGAGIYMAEYARKNWITDLIRTTIEVLSSLPSIVVGLFGFLVFVIQMGWSFSVISGALTLTIFNLPLLIRVVEEALNAIPNTQREAGLALGLSRWETITRVLVPAALPAIITGVILAAGRVFGEAAALIFTAGQSTPILDFTDWNPVNPASPLNIFRPAETLAVHIWKINGEGIMPDAQAVSDGASAVLILSVLLFNVLARLLGKFVYKRMTSS

SEQ ID NO: 2693 - protein, 307 aa, Listeria monocytogenes
LEAIKEKKLTQTSKKAHLETRGKIITFICISIMVIAAASILFFVISKGLATFTVNKVSFVDFITGTDWNPSQKDASGNPLVGALPMIIGSFAVTLFAACIAGPLAIGAAIFMVEISPKFGKKILQPVMELLVGIPSVVYGFIGLSVVVPFIRDHISGSGFGIAAATVVLTVMILPTVTSLSVDAIKSVPRHYREASLALGATRFQTIWKVVLRSSRSGILTAIVFGMARAFGEALAVQMVIGNSAVIPTSLFEPASTLTSILTMGMGNTVMGTLDNNILWSLAMVLLAMSLFFIIVIRFIGRRRKVK

SEQ ID NO: 2694 - protein, 302 aa, Listeria monocytogenes
MKKKYLGIVAMLAAVMLVFAACGSDSSSADKANGSTKGDKEVSGSLTAVGSTALQPLVEAASKEFTNTNPKAQINVQGGGSGTGLTQVQQGAVEIGNSDVFAEEKDGVDASKLVDHRVAVVGMAPVVNKDVGVKNITKQQLIDIFTGKTTNWKDVGGKDEKITIINRAEGSGTRATFEKWGLDGKTPIKAQEQDSSGTVRKIVSETPGAISYLAFSYIDASVVGLSLDGVEPTEDKVATNDWKIWSYEHMYTNGEPKGLTKTFLKYMTSDEVQNNIVPQLGYQSIKSMKVERDASGKLTDVK

SEQ ID NO: 2695 - protein, 591 aa, Listeria monocytogenes
MKKLWLKIGLSFFILFFVVMVIVGIFSGELMKSTYLNMKENQLEDDAKILLQTTNMENLDLDKDAATIQKSLDPLGEDIDARITVIDSKGDVVADTKKDPEKLDNHMNRPEVTDILKKGESVGISIRESDSLGYSMLYVAVPVKHQSKTDGVLRISISLESVDAAVAKLWGNLALIFGIALVIIAAISVFIARKITRPVREIIEVSTDLANHKYDSRIHGKISGELQDLSISVNTLAESLETQMFEIKQNEQRLNAIVQNLVSGVMLINVDKQVIMTNRTMYQILGETEITGKPFYEVIKSFALSQLIEATFETKTIQQKEIILYFPREMILDASVSPILGENGEITGIILLLHDITQIRHLENVRSEFVTNVSHELKTPVTALKGFAETLLDGAMYDEMLLKKFLTIIKEESDRLHRLIMDILALSRIEQNPVPENVELVEVDEVIEQSARTIFEMATEKNIQVIIPEKTIPSVTIETDRDKLQQILINLLSNAINYTPVDGKVEVKLIEQEAEVIIEVTDNGIGIPAKDIDRVFERFYRVDKARSRHSGGTGLGLSIVKHLVENCGGRIEVESQEEVGSTFRVTLPKKA

SEQ ID NO: 2696 - protein, 236 aa, Listeria monocytogenes
LVKILVVDDEASIVTLLQFNIEKAGFEVVTAEDGRTGYELALSEKPDLIVLDLMLPEMDGIEVTKKLRQDKVNVPILMLTAKDEELDKIIGLELGADDYMTKPFSPREVVARIKAILRRTEGKAEIIEELTEDVEATILIGDLKILPDSYEVYLQDDLLDLTPKEFELLLFLANHRGKVFSRDQLLDTVWNYDYVGETRIVDVHVSHLRDKIELDTKQPKYIKTIRGFGYKMENVK

SEQ ID NO: 2697 - protein, 391 aa, Listeria monocytogenes
MDVFVEILNGIGRLLLQPALYVGILLAILAGFNRVKWERKSFSISIYSPWLELKNFFGVSLLFGLAISVITSLIGFGVMIEWVAIFNVVACFLLIVGMFRLSSTAFTIGITSLIFYFCYYFDVSLAPFTNEVFTYDSIFIDNFMISMTFLLAVLLFVEAFLIQYTSAKNPSPSLRKSKRGKLIGSFQLRKLWFVPIVMFVPGDVFTKIFEWWPVFAIGSQSYSLIILPLFIGFQQQVQTQLPEEASRKIAIEVTTLATIIAVAGLLGIVMPVLTLFAFMFAVIGRFWISYRHYRSEQLAPKKFGPQPDGLVVLGARAATPSARLNLKAGEKITEVNSQPVRTREELYEALNLNRAFCKLKVIDNAGEPRFEQTALYENESFELGLLLIEPR

SEQ ID NO: 2698 - protein, 482 aa, Listeria monocytogenes
MGLLAYLLVILLILNVFFAAVTVFLERRDTSATWAWLLVLTFVPIFGFIIYLIFGRKLSGKKIFDWKGQEKIGIQESTANQIEMIRQKEFPFSDPNVKKHRDLIYLLLVNDGAILTQDNEVELFVDGHEKFDALIADIEKAKDHIHLIYYIFHSDELGNRLMRVLERKAAEGLNVKIIYDAMGSRTTKKSFFRTFQKNGGLVRPFFPSKLPLINFRLNYRNHRKLAIIDGDVGYIGGFNIGDEYLGASKKFGYWRDTHLRVHGKAVYAMQTRFIMDWNSASSTHKIDYKARYFPTFHGKGHTSMQIVSSGPDSEWQQIKNGYIKMINAAKKTIYLQSPYFIPDASLLEAIKIAALSGVDVRVMIPNKPDHAFVYRATTNYAGELMETGAKIFIYDNGFIHAKTLVVDGEIASVGTANMDFRSFRLNFEVNAFIYEKQMVQKLEDAFLEDILKSYQLTPELYAKRSLWIKFKEAVSRLLSPIL

SEQ ID NO: 2699 - protein, 217 aa, Listeria monocytogenes
MEIERINEDTIKFYISYLDLEERGFNQEDVWYDREKSEELFWDMMDELKYEEEFSPEGPLWIQVQALKHGLEVFVTKATIGGKGEDGFDVTLSSPDELAEEKIEKLLEENFNPVKKEALGEDDTLEFILEFRDFEDAISLSRATGLENLVTKLYSYQGKYYLNVEFPENKYDESNIDNAVSILLEYGLESNLTGYMLAEYGKVIFDVPALKQIRKHF

SEQ ID NO: 2700 - protein, 270 aa, Listeria monocytogenes
MLTTRKALYYLDKGKTKEAIRLLETCWKQEVTTKNKRDIFTATVLLSDVLYQSGEHFPEIYQQLMSILEEMQDLEAVEFEREKAKQIFAELDEYFSEVGTFFQGDSLAELWLEFDYENDYKDVYPTPQRVAAIEAELGYKLPKSYIYLMRHTQNGGIVSTGSVPTTEPSSWSENCVAITGIMGIGNQGISALNGMHNTNFWIEEWGYPDVGLAIADCPSAGHDMVFLDYRNCGKTGEPAVVHIDQEADYKIMKLADNFEAFILSLYREEY

SEQ ID NO: 2701 - protein, 177 aa, Listeria monocytogenes
MKEFLFFAVFTFIMTIGVGVINASASEIENPDNIQEAEVETFDLNGNIAQEKEIVLEDGTEGTLGVMPIIDERPLLKGTYSLANGTSTWKIYWYSGVYNCSFNAKINVSKGKGKITSAYNPWYQFYSPGLDVKKSKLSKTSSGSSASYVFDCKNKISNWNVTLKASVSGKKLTTSFK

SEQ ID NO: 2702 - protein, 371 aa, Listeria monocytogenes
VIIIFTARNNIGETFTITKMNVERIKQEERLFCKSCASPVMIKAGQIKIPHFAHEKTMKCAFASEGESEEHLAAKKQIMAWFCYQRIPVEIESYFPEINRQADIFVNGKTVIEFQRSSISISEMIQRTMDYLSIGLEVHWILGQVVKKEKGRICLSAFQQAFIQSDKKLGYHFWHYSAKREICTLYYHLTFEKGNRFFASEMKFSMKSPLREWNKKLARIISRHAYIKRDREIERQKICFYYAKYKKHGQFMQKLFNAGYYLHYLPKEIGVDVEEQFLVLTPAVEWQFDLWEKFFKGLEKGDTFSVESFLESFKSVVSQILTIWLSPNESLKLGKSYLSYLIGEGVLSTIPDNRYRVKRKMAFTNIRAAHI

SEQ ID NO: 2703 - protein, 601 aa, Listeria monocytogenes
LSKTNALPLREEVPENLTWDLTTIYPNDEAWEKAFTDLQKITEESDQFKGRLSESSQTLYEALQFRDKAYDLISNLYVYAHLKMDQDTANAKYQGLHSRAGSLVTKLMSALSYYDPEILAMDENVLKQFLDENKDLQLYDHLLEELNLSRPYILSEKEEALLANAGEVLGSSSNTFNTLNNADMKFPTIKDENGEDIEITHGRFGKLLESNDPRVRRDAFHGVYSVYEGLKNTLASTLNGQVKKSNFYASTRGYTSAREAALSGNHIPETVYDSLLKSVNANASLLHRYVKLRKELLGLEELHMYDLYTPLSDDVNLEFTYEEAKELVLEALKPLGDEYQAILKEAFDSRWIDVMENKGKRSGAYSSGSYSTNPYILLNWQDNINNVYTLAHELGHSVHSYYTRKNQPFVYGDYSIFLAEVASTTNENLLTDYLLKKYDDPKVRAYLLNHYLDGFKGTVFRQTQFAEFEHAIHQADQQGVALTADFLTETYFDINKKYYGEAMVYDAEIGYEWSRIPHFYMNYYVFQYATGFSAASALSAKILTEGQDAVTAYIDFLKAGSSDYPIDVLKKAGVDMATPNPVDDALKVFEQKLDELEELVK

SEQ ID NO: 2704 - protein, 86 aa, Listeria monocytogenes
MEFEDERLLREVLLFARSVDTKINDMSLEVIDFGNLRDYTKNEVLLTLYWLEENGFLIRNNNIAEKRYTLTLKGELLYDRFSQIEE

SEQ ID NO: 2705 - protein, 207 aa, Listeria monocytogenes
MKKVLVFAAFIVLFSFSFLSTGLTAQAALKDGTYSVDYTVIQGDSDSASMANDYFDKPATVTVNGGKSTVSLQVNHSKWITGLWVEGNAVSVTSKNASSDTRKVSFPVSTLSNPVNAKIKVDIDDDDLNYHHEYQIKLRFDEGSAKALAGAVKSSDNNTTTPATKSDSSNKVTNPKSSDSSQMFLYGIIFVATGAGLILLKRRAIFK

SEQ ID NO: 2706 - protein, 569 aa, Listeria monocytogenes
MKKLWKKGLVAFLALTLIFQLIPGFASAADSRLKDGGEYQVQVNFYKDNTGKTTKESSEADKYIDHTATIKVENGQPYMYLTITNSTWWQTMAVSKNGTRPEKPAQADVYQDRYEDVQTVSTDAAKDTRVEKFKLSSLDDVIFSYMHIKVDAISYDHWYQVDLTIDPSTFKVISEPAVTTPVTLSDGIYTIPFVAKKANDDSNSSMQNYFNNPAWLKVKNGKKMVAMTVNDNKTVTALKTTLAGTLQDVKVVSEDKDANTRIVEFEVEDLNQPLAAHVNYEAPFNGSVYKGQADFRYVFDTAKATAASSYPGSDETPPVVNPGETNPPVTKPDPGTTNPPVTTPPTTPSKPAVVDPKNLLNNHTYSIDFDVFKDGTTETSMMESYVMKPALIKVENNQPYVYLTLTNSSWIKTFQYKVNGVWKDMEVVSGDINKNTRTVKYPVKDGTANTDVKTHVLIEDMPGFSYDHEYTVQVKLNAATIKDITGKDVTLKEPVKKDILNTGNVASNNNAGPKLAKPDFDDTNSVQKTASKTEKNAKTNDSSSMVWYITLFGASFLYLAYRLKRKRLS

SEQ ID NO: 2707 - protein, 290 aa, Listeria monocytogenes
MRKMAVISLVLLLFLVGCGKEEAAQKPEQKTDKEPKIVATTVAITEIMDKLDLPLVGIPSSSKKLPKRYADVKETGSPMGPDLEIIRMLKPDMVLSTKTLEADLKSGFEGADLEADFLDFTSIASMQTEIKNLGAKFDRIEEATKLNKDLTSDIDQVKSNVAKKKKPTVLILMGVPGSYLVVTEHAYIGDLVKLAGGENVIKDQKVEYLASNTEYLQSANPDIILRAAHGMPAEVVKMFDEEFKTNDIWKHFDAVKNNRVYDLDENLFGMTASLNAPEALKEMEKMLYDN

SEQ ID NO: 2708 - protein, 329 aa, Listeria monocytogenes
MTIKQKSSFGAVIVLLIGTILWAVQAGSLSMSIPAFLSGIFSGGNEMVDVVIDLRFPRIIIALLAGAALSVSGLLLQAVMRNPLADAGVIGISAGAKFFSFVIILFLPELYFWLPLFSFIGGALACFLVFLFSYRSDFNPLRFIIIGIAINAVFTGLSDALSSQVALVSSQSASSAASLAMKKWSDVETLLIYVTIGLICALLLAKWCNVLGLENKMARGFGVPVNKTRIWLALIAVLLASITTAVVGVIAFVGLLVPHIARKLVGGNYQILVPFSILFGALLLLFADTIGRTLFQQMEIPASVIMLIIGGPFLIFLMRKGDFYGSKGR

SEQ ID NO: 2709 - protein, 369 aa, Listeria monocytogenes
MKRDVLYNRIILSVFLLSLVSCVAIYYAQQTNQYNTNFLGMQLVFLAIGTLTCFGVSRLPVEFLRHHAIWLYVIMVITLLGILIPNPLVQNINGATRWYRFAGLSFQPSEVVKSIFIFVLAHFAVKYQAQKWKQLGILTVLTGIVLLLIMKQPDLGTTIVYGVTALAIILLAIKSTKLMVGIITLILTAATVGMYVVVYHISLLEKIGFHAYQFSRIQTWLDPTTDPDAVYQLNLSMKAVGSGMMTGSSGTNAYIPESHTDMIFSTIGHQFGFVGVSLLLILFMVLIHQLIMAALLMKNTFSSLVLAGFAVSFAFNIFENIGMTVGLMPLTGIPLPFISYGGSAVLGNFIAVGVVLAIIRSDADLIEEK

SEQ ID NO: 2710 - protein, 259 aa, Listeria monocytogenes
MEVRDVNFSYNGTDAILKNVSFTIQKNKINTIVGPNGSGKSTLLEILARLLSPNSGDVLLEGKSIFEWKAKEFAQNVAIVHQSNVLPNELMVKELLYFGRLPYKNWRMTRTKEDDLAVERALMQTELTEKAEKFVDSLSGGERQRVFIATALVQDTPILLLDEPTTFLDMYFQLEILELVKRLNQEENLTIVMILHDLNQALMYSDHLIVMKNGEVVAKGEPEELLTTDLIAETYGVVADVLNDANNGKYIVPQRRKEF

SEQ ID NO: 2711 - protein, 246 aa, Listeria monocytogenes
VKIKSFLGKSLTLVVLGVFLFSGWKIGMELYENKHNQTILDDAKAVYTKDAATTNVNGEVRDELRDLQKLNKDMVGWLTIIDTEIDYPILQSKDNDYYLHHNYKNEKARAGSIFKDYRNTNEFLDKNTIIYGHNMKDGSMFADLRKYLDKDFLVAHPTFSYESGLTNYEVEIFAVYETTTDFYYIETEFPETTDFEDYLQKVKQQSVYTSNVKVSGKDRIITLSTCDTEKDYEKGRMVIQGKLVTK

SEQ ID NO: 2712 - protein, 158 aa, Listeria monocytogenes
MKLYELTDNYLKVQEFLEENNTDAVKDTLDALTDSFHDKSENIVKIIKSLAADAEMAGIEAKRLLKRKQALENNVQNLKNYLQTEMERMEIRKINSTLFTIQIQKNPPSVEIVEEALLKPFFLLQEPKIDKKRIAEILKSGEEVKGARLVESESIRIR

SEQ ID NO: 2713 - protein, 115 aa, Listeria monocytogenes
MNDHRILNALSYFSILFAPIIVPVLIWIFAKSEEVSHHAKVALLTHIIPTIAGFLCFSSIFVTATTSGGLLANVSLFVTGSLFVFTLVAVVGLFIFNIVRGIQMLCEKTEEDIWI

SEQ ID NO: 2714 - protein, 187 aa, Listeria monocytogenes
MDRRVKKTKKAFNQALFTLLDQKPFQQITITDIVTEADVNRGTFYKHYRDKEELLDSIIEEILMDLKSAYQDPYLHTSHFSIQTLTPSMIKIFDHVYHHQAFYRQVIKSTIRPSFQNQVCDVIRELILDDVASFPDSSEANLQLLATYQAHAIFGMIVFWAEEDFSHSPAYMSEQLLYIIHAKTQQV

SEQ ID NO: 2715 - protein, 253 aa, Listeria monocytogenes
MGKLNGKVAVVTGAASGMGQQIAILFAKEGAKVVVADLNLEAAQKTVELVEKEHGTGLAVVANVTKQEDIENMINQAIEAFGTLDILVNNAGIMDNFVPAGELTDELWDKVFAINTTGVMRATREALHIFEEKGQGVIVNIASAGGLFGSRAGAAYTASKHAVVGFTKNVGFQYANKNIRCNAIAPGAVNTNIGTTIYAPDEFGQERAMIGMGINPRAGDASEIAKVALFLASDDSSFVNGTVITADAGWTAY

SEQ ID NO: 2716 - protein, 357 aa, Listeria monocytogenes
LVEQLVSNAAILLAGFYIISLVYKEPITKELSTNKKIVIGIWAGLLGFALMVFGIPISNNVIVDLRHIPIIMVGFYGGPIPAIVSAIIISASRFLLSVNSAAIMAAVVMMLIGIITAIFGKRIEKFKIWGVFILNIIACSFVVINLHLILARESHFWINMTVFVLIALVIGAVSAGLMSNMIKSKQLFQKYEQDSTLDYLTKLSNVRQFDEKINHVMDAGSRQVTLMLIDIDYFKNINDTYGHDAGDAILKQLAIILKRNTSDGSEAFRNGGEEFSIVLLDCPIEKGNFFAEQVRRETEEYDFMIPSGQVVKITISVGVSSSKDGANTSEGLFKSADEALYKAKLTGRNQVCIADGN

SEQ ID NO: 2717 - protein, 455 aa, Listeria monocytogenes
MFDLMDNLLGVQSFGELNKDMPTTLFVTDADGNILISNKFTALTVGMSLEELLRCNVRDLVEDGVYNDSVTLEAIRTKQKKTKVINTKKGFSIRSTSTPILYPDGTVHLVVTMSDETQPDSFKTWRGEAISGNKESLLLEDYKENDGTVIVAESVAMKQIVRVCNQIAPFDSKVLLYGESGTGKEVLSRYIHEKSKQAAGPFISINCAAIPKALFESELFGHEKGSFTGADIEKPGMLELADGGTLFLDEISEMPLELQAKMLRVLETGEVRRLGSTTETKRRFRLISATNRNLGEMVEKGTFRRDLYYRINVVPVHIPALRERPQDIIGLARQFIQKFNQKYQKDFQLSGDKTKELLSHNWPGNVRELRNKIERLVVMSGNKEVTVAETDDFALDLHFKEQTKKDSLYLKDYLQGVEKHFILRVLEESNGNVTKAASTLGIHRSVLYRKLKTLH

SEQ ID NO: 2718 - protein, 527 aa, Listeria monocytogenes
LSKVIKASEAAKLLKDGDTVAFSGFGLACVNEEMAIAVEKRFLEEGAPRNLTVMHASALGDRREKGMSHWGHEGLIKRWIGGIAIASPKMAKLIEEDKCEAYNLPQGVITQLYREIAAKRPGVITKIGMGTFVDPRIEGAKMSASSKDNLVELLTIHNEEWLFYPSFPIQVALIRGTVADEFGNLTLEKEGLHMEVLPIAQAVRNSGGIVIAQVESVAKKGSLNPKDVRVPGILVDHIIISEPENHFQTENTQYNPAFSGHIQVPLGDIEPLPLDDRKVIARRSAAELEPQTILNLGVGIPVNVSTVAAEEGVSDQLILTTEAGSVGGVPAGLADFGHAYNSEAIVDHHSQFDFYDGGGLDLSVLGLAQTDESGNVNVSKFGSRVAGCGGFINISQSAKKLIFAGTFTAGGLKTRVAAGKLEILQEGKAKKFIKQVQQITFSGEYASTTNQTILYVTERAVFRLENGKMVLTEIAPGIDLEKDILGQMEFEPIIASDLKVMDGGMFSEEWGGLKAIIEKQTREGVSI

SEQ ID NO: 2719 - protein, 407 aa, Listeria monocytogenes
MTKEINRWGVLIGSVGVLLCTGAVYAFSVFAGPLSAAHGWTIPQVVMAFTINAAIGPIPTILGGILTDKGKAKWAILIGGILFGLGFALTGFATSTTMLYLSYGVLAGLGQGFAYSGCLSNTIRLFPDKRGLASGLITAGMGGATIIAAPIANYLIETYNVMTAFKIMGAVYIAVVIGCSFLIRVAPAGYTPKGWTPPANNVAGMVNVPWTGMVRTVTFYLILLMLGIGAFSGLMIASNASLIGQNMFGLTAASAAAYVSIYSLSNCLGRVVWGAVSDRLGRSNTLMIIYTVIALSLLALTTLQSVVGFVIGIIGLGLCFGGTMGVFPSIVMENYGPKNQGVNYGIVFIGYSTAAFFAPKMAAQIAGQNGGDFTQAFYIAIALAAVGLCINIVYKLREKKQPTKELA

SEQ ID NO: 2720 - protein, 376 aa, Listeria monocytogenes
MRAGRVLFVTYLLLAIWSLLLVYSTSYGVAVMRYKVEPSYFFHRQLLFYGLGFLGLLVCSRINVQLFYLRRTLRILAGSLLGLLLLVLLTGSAANNAQRWLSIAGVTFQPTEMVKLLLILVIATVFLKKGCGVRVQYWLLGFLFLTVGLVFLQPDLGTALILGVIGVALFLTSGVGLTRLVRVAIWSFGLLLLVAMLIYFFHPDFFSSAKLGRFAFLDPFNLDNLDASYQLRNGYYAIGSGGIFGNGLGGSIQKLGYLPEPHTDFIMTVIAEELGVFGVIWTIFLLMALSFTALYIAISSHFIFDSMVCIGVASWVSVQMFLNLGGVSGIIPLTGVPLPFISYGGSSVVMLSCAVGFVLAAARRNVLAKTREVVYL

SEQ ID NO: 2721 - protein, 309 aa, Listeria monocytogenes
MSLTEMLQIKYPILQGAMAQIATYELASAVSNAGGLGIIASGGMSADALREQIRLCKEKTTKPFAVNIMLMMPNCPELVDVIIEEDVRVVTTGAGTPKPFMEKFKAAGIKVIAVIPSVKIAQKMEEIGVDAVVAEGTEAGGHVGETTTMALVRQVVSAVNIPVIAAGGIADGHGMAAVYALGASGVQIGTLFLVAEECPVPASFKQAVLDATDTSTTVTGRRNGAPVRSIKNPMIQKYVELENENASRDKLEELTLGSLRKAVHEGDVENGSVMAGQICGMLTEIRSTSDIIENLMKESKQVASNLVIQ

SEQ ID NO: 2722 - protein, 129 aa, Listeria monocytogenes
MTAKMLHTCIRVKNLTESITFYEKALGLKEVRRKDFPDFEFTLVYMAFEEGGFELELTYNYDQKEAYDLGNGYGHLAVGVLDVRALLKEHQEAGFTVTDLKGLPGEDPFYYFLTDPDGYKTEIIQDGAL

SEQ ID NO: 2723 - protein, 205 aa, Listeria monocytogenes
MTKIKRIMTGIIQENCYIIYQDNVALIVDPGDEASKIEAEIAKLEVKPVAVLLTHCHYDHIGALEEIRKTYNIPVYVSPLEQEWLSNPELNLSAHIAGKAIIAQPAENEFTLGEYNIEGFRFKVVPTPGHSIGSVSFIFDEFVVVGDALFKGSIGRTDLYTGDFDMLINSIKTQLFVLPDDFPAYSGHGDVTTIGHEKKTNPYFN

SEQ ID NO: 2724 - protein, 223 aa, Listeria monocytogenes
MHSDEEIFKETTPKALLQLLKKDYTFHDYCYQEIIPRGKEIKMNNSKGFKIYLVESGYFSYCLQNEYGDSGIISFVGGEIAINLIPIIKEEPEESVLRSLTEVHCWVLDPDFVERVLDESGQKAKYLLSNLLYTRKVYFKASKRNFMKKELRIRACLKEIGLYMGRVTKDKEFILPDEINNSILAQYANTTREYTNIIVLKLRKEGILDDSHKPWVIKKIDTL

SEQ ID NO: 2725 - protein, 231 aa, Listeria monocytogenes
MNTLEKRQHEILTNPLHFCKKSGDFAKHSMSIKLSKNELFDVDFVTGIYFVEKGIVMKGTQIDDYIGYDQLLKHGDVCNFSSFMSSDLKRNIGAQLLSPSSSVITAVDRDFFIFMVEKHVSIEEFMLYQAKKEIMILQRRCLLNTLKVKDRVKHLIAAIGYEYGISNGDNIQIPQELSTTFLSKFMGITREYLSLTLSELKKEGYLLNTKIPVVINVEKLFNEIPYESLIL

SEQ ID NO: 2726 - protein, 292 aa, Listeria monocytogenes
MSEYLEIPELNKAFPFRSFVNEGEVLVYPHWHKEIEIIYALKGSLNLGINDMPIQLKEGEIQVINGGDVHYFLASPSSERIVIQFDLSLFQEEMQMDDKMQTLREMLTEMAHLSREWPEETVAKMQSLIMNIHSESSGEKPGKHYILKADLLAIIGLIYREIPQIKTQPDSVISEDAVLKSQETLHKLDQIFSYVEKHYQEPVSLQEVANYTGFSTYYFTKFFKRNTGMTFVTFLNDYRLNKAKWMLLNEAFPVTEVAELAGFSSVKTFHHAFKRAMGVAPLKYRKTIYGNN

SEQ ID NO: 2727 - protein, 358 aa, Listeria monocytogenes
MTLKVGIIGCGGIANGKHMPSLLKAEKAEMVAFCDIVLEKAEAAAKEFGSENASVYTNYVELLQDKSIDVIHVCTPNISHAEISIAAMEAGKHVMCEKPMAKTTEEAKSMIEAAERTGKKLTIGYQNRFRKDSDYLHQVCENGELGDIYYAKAKAIRRRAVPTWGVFLDEEAQGGGPLIDIGTHALDLTLWMMDNYKPKYVVGNSYHKLAKKENAANAWGSWDPNKFTVEDSAFGFITMENGATIVLEASWTLNTLDVGEARTSLSGTEGGADMEDGLRINGEAHSQMYEKKIQLEAGGVDFYDGTGDDPALIEAEQWLEAIEKNTDPVVKPEQALVVTQILEAIYESSKTGQPVYFN

SEQ ID NO: 2728 - protein, 246 aa, Listeria monocytogenes
MKAKIALQLWSVKEACEDDFFGTLEKVAEMGYDGVEFAGYYGKSASEIKAKLAELGLEVAGSHISKEQLEVDLENVILFERELGNEYIICPYADFKTKQEWLAFSEKLLEITKTVQQAGMHFGYHNHAHELDKLDDEIILDSLLKNVPEMVAELDTYWIEYAGIGVIPFIEKYRNRVPLIHIKDKSRANKESTIIGEGVLDVPGFVKTALHSGTKWLIIEQEAFTQDPLTSVAKGYTYLANVLEEN

SEQ ID NO: 2729 - protein, 240 aa, Listeria monocytogenes
MTRVTVWNEFLHEKEDDAVLAIYPDGIHGQIASFLEKAGIEAGTATLEEPEHGLTEEVLANTDVLIWWGHMGHDRVEDKIVDRVQKRVLEGMGLVVLHSGHMSKIFMRLMGTSCDLKWREANERERLWVVDPTHPIAKGIGEFIELDEEEMYGEHFDIPTPDELIFLGWFEGGEVFRSGITYKRGNGRIFYFQPGHESYPTYHHPDIQQVIINGVHWCAEGRKNYPAYGNHQPLEKIGRK

SEQ ID NO: 2730 - protein, 322 aa, Listeria monocytogenes
MKLGVFTPLFANLSLEEMLDKVKAAGLDAVEIGTGGNPGNHHCPTDELLASEAARKEYLEKFTSRGLTISAFSCHDNPISPNKEEAAASDEILRKSIKLASLMNVPVVNTFSGTAGDSDDAKAPNWPVIPWPTVYSDIKTWQWETKLIPYWKEIGELAAASGVKIGIELHGGFLCHTPYTILKLREETNDSIGVNLDPSHLWWQGIDPVGAIKILGKAGAIHHFHAKDTYLDQDNINMYGLTDMQPYGDVQTRSWTFRSVACGHSLTEWSDIMSALRTYGYDYVVSIEHEDPLMSIDEGFDRAVTNLQSILIKDKPLDMWWA

SEQ ID NO: 2731 - protein, 349 aa, Listeria monocytogenes
MKKYQLVIVGYGGMGSYHVTLASAADNLEVHGVFDILEEKREAAAEKGLKIYESFEAVLADEKVDAVLIATPNDSHKELAITALEAGKHVVCEKPVTMTSEDLLAIMDVAKKVNKHFMVHQNRRWDEDFLIIKEIFEQKTIGEMFHLESRVHGANGIPGDWRHLKAHGGGMVLDWGVHLLDQLLFLVDSNVKSVSANLSFALGDEVDDGFVTFITFENGITAQIEVGTTNFIKLPRWYVKGTEGTGIIHDWDLSGEIVQPTALAKTSEPTPIKAGQGLTKTMAPPSEEATNTLSLPAPAKLAPSFYNNFIDVLNNTSEPIVQNEEVYQVLKLIEAIFEAAETNRTIHSI

SEQ ID NO: 2732 - protein, 633 aa, Listeria monocytogenes
MTKKVLPKEASEFTKKVNEKVKKSLPFENTKDFDDAKKGFIGTWDHVKVDTEDGHAVWDLEDYKFIEGEAPDSVNPSLWRIAQLNMTNGLFKVTDRVYQVRGFDMSNTTIMEGDTGLVITDTLMSVETARAALDLYYEHRPKKPIKAIIYTHSHADHYGGVAGLISKEDVASGKVALIGPEGFMEAAVSENIFAGNAMIRRAEYMYGSRLSRGELGQVDAGLGKTASKGHMSLLAPNDTITFDHEKRVVDGIEVEFLMAPNTEAPSEHMMYFPQFKLLNIAEDAVHNLHNILTLRGAQIRDAYEWWKDIDKAIRAFGDKYEVCIGQHHWPTWGNEEINDMLIHQRDAYKYMHDQTLHFINKGLTAIEVAEAVKFPPALEEKWYLRGYYGTLNHDVKAIYQFYLGWYDGNPADLYPLPPEDVAKKYVEFMGGVDEVLKKARVSYEAGEYRWVAEVVKHAVFADGENGEARALLADALEQLGYQSESGPWRNVFLAGADELRNSVPDEVISGVTLDIVEGMPFNLILDYMGIRLNGERSIGKRISMNWKLTDVDENYHLLVNNSVLIYREGEVDDKADLTLTTTRDTFNHIFGGVKSFEAAFADQTAKLEGDVKKFGEFASLLDEFNPVFNIVTP

SEQ ID NO: 2733 - protein, 113 aa, Listeria monocytogenes
MFTKKRGLMLLAAVLLTVCAIWEYAMPTDAAVKSYYVKVEDAGKPVQKNQFKGFKYVSNVYDDKGKQKQLTFYSEKELTKNEQFKVLVGENKMVVNYKKIKNVPDKIKYLAEK

SEQ ID NO: 2734 - protein, 763 aa, Listeria monocytogenes
MKWGLQMTTYIVKDGGNRKLPFDKSRLDGYLEKIHEEFPKLDLEDYKRKVFNFVEKKEDYAADELVDYLIREAEARTDIHIPEWEHFAARLYLNKLYKKASKNRFYNDDDKYGSYVGLQESLGERGIYSGNILKNYSKEDLIAAGKLIDPEKDKLFTYNGLYLLATRYLATDSERNVYELPQERWLTIALYLMQNEPKEKRMKLVEEAYWALSNLYMTVATPTLANAGKVGGQLSSCFIDTVDDSLQGIYDSNTDVARVSKHGGGVGAYLGYVRSTGAAIRGVKGASGGVIPWIKQLNNTAVSVDQLGQRKGAIAVYLDVFHKDIESFLDLRLNNGDQRLRAHDVFTAVCIPDIFMEAVERRGEWYLFDPHEVKAKKGWYLQDFYDESKGEGTFREKYEELVADETISKKIVKAIDIMKRIMMSQLETGNPFMFYRDEVNRMNPNKHEGMVYSSNLCTEIMQNMSPTKMIQEIISGDQIVITKQAGDFVVCNLSSVNLGRAVVAEEGTLERLIEVEVRMLDNVIDLNELPVPQATITNQKYRSIGLGTFGWHHLLALKNIAWDSEEAEKYADELYEQINYLAIRASNKLAQEKGAYKVFKGSDWNTGEYFARRNYNSPEWQELAKEVAEKGLRNAYLVAVAPNMSTAQIAGSTASIDPIYSAFYYEEKKDYRRPVIAPDLNLSTYPYYEKGAYKVDQFASVRQNGRRQRHVDQSLSFNFYVPSGIKASKLLELHMTAWNEGLKTTYYVRSNDIDVEECEWCSS

SEQ ID NO: 2735 - protein, 349 aa, Listeria monocytogenes
MANQKEQLTRIKILEPLFPNRSTSIINGETSGILNWNDIPYPSFYRAYKELSTNYWIPDEVDMKSDAKQYPALSEQEKYAFDAIIGLLATLDSPQTRFIYNIAEYITDPAVHANAAIIAQQEVIHNESYSYVLASITNLQEQNRVFELARTHPTIIKRNEPIMDAYDDFMNNKTGETLVKALIQSSILEGINFYSGFAYFYNLVRQNKMTGTGKIISFINRDELAHSKFISEVIRAILGENPELQTEELVEYTHEAFRHAVELETEWSEEVLQGIEGIDVEEMVDYVKYRANKMLGMLGIPELYPGHSDNTMTWIKAYADNFTETKTDFFEMRNSSYKKTNMDNGFDDL

SEQ ID NO: 2736 - protein, 145 aa, Listeria monocytogenes
MRILLAYDSLSGNTKMVADEIEEILISEGHEVVSFRVSPLAEYPLDEDFDLYVLGAWTVDYGRTPPDMKDFIAELAVKPKNVAIFGTGETQWGMDFYCGAVDRMAKYFGTSYPTLKIEQMPHTEQDVADIDNWVRKILALRSGIK

SEQ ID NO: 2737 - protein, 108 aa, Listeria monocytogenes
MTSIEIKSPEEFQAHINGEELVYVDYWKDNCPNCKMLDLSFAEFKNSEIASKVKVLKVKLEEMGENFFFDRDVQQTPTLVLYKGGEEIHRLNGFIPPNKIEEAVSLNA

SEQ ID NO: 2738 - protein, 99 aa, Listeria monocytogenes
VKQLQAEITAFLKERDWLDQYNHPKDLAISLSLEAAELLECFQWKTDEIALKENREELLKEVADVLIYALQIAESMGADGEELVRMKLAENRRRTWPKK

SEQ ID NO: 2739 - protein, 856 aa, Listeria monocytogenes
MKKLHVKKQGNNLLKESQMGKEKVLEKLGVMETGLTNVEVTERLAEFGPNQTVEEKKVSNLRLFIRAFNDPFIYILAMLMVVSYLTDDMEATVIMALMILASGILGFIQTSRAERASYALKNMVKNRVNVIRNGSMDLVMQDAIVPGDLIEISAGDIIPADARVISATDLLINQSALTGESIPAEKFVEDKRADPEIFERENLLFMGTDVLSGHGRAVVLRTGSSTFFGSLSIAATERRGDTSFDKGVKSISKLLFYFMMVMVPIVFMINGLMKGNWLEAFLYAVAIAVGLTPEMLPMIVSTNLAKGAINMSKKKVIMKELSAIQNIGAMDILCTDKTGTLTEDKLELIKYIDSAGETSERVLKMAYLNSYFQTGWKNVLDHAVIAKLDESTASGWKKVGEIPFNFDRRRLSVVVENRAETRMITKGAVEEMLTVCTHKEFGGAVSTLSESEKSELQDMCAEMNRSGIRVIAVAYKTGKVGEAFTKTDEEQMIIAGFLGFRDPVKASTKEAIAHLFKNQINVKVLTGDNEIVTKRICQEVGIPANGFLLGADIEELSDEELTRELRKYHIFAKLTPMQKSRIIGLLKKAGHTVGFLGDGINDAPALRKADVGISVDTAADITKDASSVILLEKSLTVLNDAVMEGRNVFGNILKYLKMTASSNFGNVFSVLVASAFIPFLPMLSLHLLLQNLLYDFSQLTLPWDKMDRSFLKKPHQWEQKGMLRFILCIGPVSSIFDIATFLIMWFVFSANTVAEQALFHSGWFVVGLLTQTLVVHMIRTEKIPFIQSRAAAPVMIATLSVMALGIIIPFTGFGHSIGFVSLPGSYFPWLILILVGYMATMQLVKTIYIRKFREWI

SEQ ID NO: 2740 - protein, 105 aa, Listeria monocytogenes
MDFKEYQILANRTAATHEQALTNYGLGITGEAGEVADLIKKYAFHGHDLDKESLTKELGDVLWYVSQIAKWADISMETVAELNIEKLKRRYPQGFSTERSKLHID

SEQ ID NO: 2741 - protein, 213 aa, Listeria monocytogenes
MTKAIWTCRAFLLGYFLVLHFTADTYTFLILNVGLAYIPFEIAVFLTKKPRVWWIFWPLGIVWLVFFPNAPYLLTDLLHLQRLEIYGAEGVLSTAPWLWRHFTYIIVGVFFGLFIGFWSFAKMLAEIRRRFNWTSLLSYQLLLIGLILLSSYAIYIGRFSRLHSIHLLTQPIDSLQIMFSVFHWPFWNFVFYFSIIQYVIYTLFSRFSSSLKN

SEQ ID NO: 2742 - protein, 335 aa, Listeria monocytogenes
MSQILFKTKTFWYGIALTFCIATLSYFLAKLPFLMILGQLVTAILIGIIIRALFPVPDKWFTGIQFSNKVILRAGIILLGFRLNLVDIYHAGWRVFLIAALCLSFGITIVYFLAKLFGVDKKLAILVACGTGICGAAAVVAISPQVKADNNQTAVAATIIALLGTIFTVIYTLIYPILPLGPDGYGIFAGATLHEIAHVIAAADPGGSSAVDMAVIVKLTRVALLVPVCFVVAKMVNAGTKNRFSWAELPVPWFIFGFLATSAINSFGIIPTSVTDFLVICAYFLIAMSMGGLGLNVHLPSFGKMGGKPFAAALIGSVFLSVFGLALVLLFHLAG

SEQ ID NO: 2743 - protein, 284 aa, Listeria monocytogenes
MDEALRTYIRVVELQSFTKAAEELHISQPAVSLQLKKLEELYETELIYRQAKKFILTATGEILYHRAKQLEGLYKQVEDEISLYHHHLKGRLRIGASFTIGEYYLPEVIAKFHALYPDITIELIIENTAKIADKVELLQVDTGLIEGQVSKKDLEISAFSDDEMCIVGRADGSLTEIEQGATWIAREEGSGTREYLDHVLSTNGWNVAEKVVAWSNMAVKQMVLEGMGYTVISKCVVQTEITAGKMQTFNESGSLMRKFSVLKNRQRLENRIAETFLTFLKENQ

SEQ ID NO: 2744 - protein, 338 aa, Listeria monocytogenes
MKEYFIDRSYKASMGIANAVLVTLGIGLLLQTIGQMTGISFLATVGAIGKTMLIPGIGVGIAMCLHANTLVTISAAASAVIGGGAVATLAGGGVAITSGEPVGAILAVIVAVWTGKRVTGKTKFDMILIPGVSLLAGGLSGILFAKIMAPILASVSLGISSLIGGSPLISSMIIAFVFGLLILSPASSAALAIALQLDPTASAAALIGCSVQFVSFAVLSYRDNNWGAFFAQLICTPKLQTPNIIRKPSLMLVPLLTTLIAGPLGVMVFHIQAASEVAGLGLCAFVAPLYLIANYGFSTLAAFILVAVVLPGVIALVVRPFLIKKERLKTGDLTIELQ

SEQ ID NO: 2745 - protein, 244 aa, Listeria monocytogenes
MVRKLNKMNDASPLYAQIADDLREKIQSGIWKTGDKIPPELDLCELYNVSRITVRKAIDELVRENLLYRERAKGTFVRDWEEAEDEHFTLVRSFTNEMKELGKKAATLHAEVEVINADKKIALQLGLAVGDKVLQVKRLRGTKDLAFALFISAIPYRQAYSLQAEDYYGSFYEYLKGFGIVVNQEKEYIEAMLPNREVQEALAIDKQEPILKRVRMTKQKESDFREYSECFYVGKHYRYYIDFE

SEQ ID NO: 2746 - protein, 580 aa, Listeria monocytogenes
LSTYDLAPEVKIHQFDGAWAGYKDIAGELLTAIQKKNNEHIIVAIECYPGTRNEEIVAELLPLLPVEKAVFADEWALNNEEVTNKVQSHLTDDRVFGIMSHYEVSDFYPAEKLAEIQAEISASKGLVVIYGTGATVIAPNPDILIYADLARWEIQCRYRRENKPNWKADNANEDALRKFKRGYFFEWRMADRQKKKLYQQIDFLLDTNKKNEPKMVRGEDYRNGLKQVSKAPFRVVPYFDASVWGGQWMKNNFGLDPTADNYGWAFDGVPEENSLYMRFGDIRIEVPSTNVVNHFPNELLGPKVHSRFGTEFPIRFDYLDTVGGGNLSLQVHPLVEYAQDKFGIHYTQDESYYILEADSDSTVYLGTKEGTTKEAIMADLEKAAEGNYRFPDEKYINVFPVKKHDHILIPAGTIHCGGPSTVVLEISATPYIFTFKLWDWERTGLDGMPRPVHLEHGRENLQLDRDTKWVNDNLINQFETLHEDNDSKVERTGLHELEFIETQRHWFKETVTVHTNDSVNMLNLVEGTSAVVESIDDSFAPFEVHYGETFIVPAIVGTYQIRNTNASEKVAVIQAFVRNL

SEQ ID NO: 2747 - protein, 221 aa, Listeria monocytogenes
MEKSGFVADPIYGEIKNEIMANTLENGEKVDIEDIMKRFQVSKRVAFSALHCLHKSGILCKNIGESGFSVAVNSEAEHREKSRLKLAFFHLNYAVQKLQEQDAELCATCLRKELVYIKLAAREHDTEVFINHVKNFYACMIHYTEMPAMEKNIDILSQTLRNMKEKNEKLFFEAFTIDVSQALEELVTHLEAKEFEKCHTVIQQFYDKNISILFSESKNPE

SEQ ID NO: 2748 - protein, 157 aa, Listeria monocytogenes
MQIRLSKREDAASMIELEHLVWTPGTTPGDIHFDSEAEFLLKSPPGSKIVVVTDDKVVGILGYKSPIPLASNKHVAEIDIAVHPDYQRAGIGQLLMDKMKEVAREKGYIKIALRVLSINQKAIRFYEKNGFKQEGLLEKEFIIQGEFVDDILMAYFL

SEQ ID NO: 2749 - protein, 411 aa, Listeria monocytogenes
MSKFWVITKQVYKRRVKTKSFLISLLFPVLIAALIAGIPKMVDYFDSSSDITKLAVLAEDPVFAKSLAADKNHFKVNTDIKDKKSAQSALKDGKIDGFVTITQKDDSVSAVYTTQETAGQDIITRLTKDLTATKIAEKAAAYKITNEQLQSITSPVSVTNDLESNNQLTNHEKDVMSAAVLILTLIIFIFVMSYANIVASEIATEKGTRIMEVILSSVSATTHLFAKLTAIIFMLLTQIGFYIICGAIVLIAGRNTEMVQNVLDQIAVFPAYYLVLNLLFVILGLLLYILLAAMIGSMVPNVETVAQFIYPMTILAIIGYWGSIAAANAPDKMLVIIGSYIPTFSPMMMLARMDLLSVSTIGIFSSLAILLVSVVGAFFLTVRLYQGNVLLYSNDGLWKTWKTSLSYAKRK

SEQ ID NO: 2750 - protein, 300 aa, Listeria monocytogenes
VTLELHNVTKKFGTKVAVNDLSFRVEPGKILGLIGQNGAGKTTTFRLILHFLEATSGKITWDGKEVSKIDPNIIGYLPEERGLYPNVTIEEQLIFFAELKGYPKQKIKAEIDSWLERAEIVGKKTDLIKTLSKGNQQKIQLLSTIIHQPKLVILDEPFSGLDPVNAEILKKFVFDLRASGAAIIFSSHRMENVEELCDSLLMLKKGNVVLQGTTESVKSVFGRKRILIESSHSAAELATLPGVLNVQTHRDGVLQLEIAHESDAEKIFDYVTKDGFIQTFSLQAPTLEEIFKWKAGELNE

SEQ ID NO: 2751 - protein, 485 aa, Listeria monocytogenes
MLLTKSEHALINLFLTKNDFLTAKQLAEILDVSSKTIYRKIKNINETTGRKDIIISEKGRGFKLDYKAYIQAKLETTGDIFGYTPTERREKILLQVLFKSPKYLNVTELYEDYYVGYNSIKNDFSLLNQAIEKYDLALEKRQKEIRVVGTEENIRTAINEVINNLDLSTYDDLKTEYSDLNKADVQFIVRQMELIENKLMISIPYPYDINIFSHLYILINRFRQGEVEDFKESDDDYIVTNEKLHTLAVEAIDAIEQYLKMKLPKRETFHFLQYLISSRFNHEIELVPGKILPIVEEMTDFYIEQVAAKINMPINKKQLKIELLSHMKPMVNRMNHQINIKNNLLSDIKLEYGKLFEIIKETARDAAKTFELNTISDDEVGYITIYFAKHIEASPLVKRIIIMCSSGIGTSELLKVKVQKAFPDVEIVDVLSSTRFKNSLHDYQNIDFILTTINTESTKEIPSLLVSAMFTEKDKIMVKKLMESL

SEQ ID NO: 2752 - protein, 157 aa, Listeria monocytogenes
MDIQELDISKVISPALVNLDLQATSKLEVIEELTDLLVETGAVADKDAFIADVLYREEEGKTGLGEGVAIPHGKSTSVTSTSIAVGRTKNLVEWESLDDKPVNIIILFAVKNSDATTTHIKLLQKVAILLADDEVIGQFQTVQTKEDFIKLLAKNQD

SEQ ID NO: 2753 - protein, 103 aa, Listeria monocytogenes
MNIIGIAACTSGIAHTYIAKEKLTKAGLALGHNVHIETQGTIGIEDELSAEQVKNADVVIIAADIKISGKDRFKGKRVVEIPTDLAIKAPKQIINKIDKEINN

SEQ ID NO: 2754 - protein, 364 aa, Listeria monocytogenes
MKKLQIKKHALTAISYMLPLVVASGLLIAIGNLTNGQVIENYKAPYSIPDALVSLGVLGMGLLAPVIAGAIAYSIADRPGIAPGLLMGLIANSIGAGFLGGMLGGYLVGYFVLILVKYLKVPKWAQGLMPMMIIPLISSLVVGLLMYFVVGVPIVWATEAMTSFLQGMQGSMRFVFGAVLGAMAAFDFGGPVNKVASLFADGLLLEGVKEPEAVKILASMVPPFGVTLSWVVSKLIKKKKYTKSEEDNIKIAFPMGICMITEGVIPIAAVDPIRVIISCTLGAAVGGGLSMTWGIGSPVPSGGMFIVPAMNEPLLFCLALLIGTCVTAAMLLILKREPTKEEELIADQGLEEEDEVDLSGIKIS

SEQ ID NO: 2755 - protein, 284 aa, Listeria monocytogenes
MYVSMKGMLERANKEHYAVMAINCFNLETARAVIDAAQELRAPIIIDLLQDHLTSHLGSRFLTKPIIKMAEEASVEVAINLDHGHDVAIVKQCLADGFSSVMMDASSFPYEENVAITKKMVEFAEVYHASVEAEVGNIGAVTGDNYTNQEMYTDPKVAIDFAKRTGIDALAISYGSSHGDYPEGFTPAFQFDIVREIKSATNMPLVLHGGSGCGAENIRESVRLGINKINVGSDFMKAQVNQIKTNLKESPAVNYVDLIHETIKAGTKAVKYYIHLSGSTGKSL

SEQ ID NO: 2756 - protein, 188 aa, Listeria monocytogenes
MITNESIMDATLCMMAKHGIKGSTTRQLAEAAGINEATIFKKFKSKDNLIHMTLEVQFESMKAEINQFFDKDFESAKVFLRQASQFISDIYEKYRDFMVISVREMGSKDMEFIDPSIVEYLYERVNEKVKEMVPSKNSAQEADAISLILNSVILLIMVEKVRDDIYKRPPTITTTADSLADVLLKLLK

SEQ ID NO: 2757 - protein, 299 aa, Listeria monocytogenes
MLVNMKQLLEVAKENKFAVGAFNVADSNFLRVVVEEAEKNNAPAIIAVHPTELDFTKDDFFQYVLARIKNSPVPFVLHLDHGDNMGDVMRAVRCGFSSVMIDGSLLPFEENIRVTKEVVDVCHKLGVSVEGELGTIGKTGNSIEGGVSEIIYTKPEEAEEYISRTGVDTLAVAIGTAHGIYPKDKEPKLRLDILKEIKALVNIPLVLHGGSANPDAEIAAAVEIGIQKVNISSDYKYAFYKKCREILSTTELWDANAIYPDCIDAAKEVVKYKMGLFESIGQVEKYQQAKTTAWRSELI

SEQ ID NO: 2758 - protein, 243 aa, Listeria monocytogenes
MYLKETLDQFASIDNILKLLKKNPSFNKHCIQERLPQKTIITSNKQRKHIYIIEEGFMKLIFDDNKPRDFSYILSKGAFPFLPVYIEDIPEHTMMVALTDIVWWKIDIGFFKSMMEIEDPRNYLMLHQLAETRRRFYTIAYQEKLTSRESIYYSLSTLIEFGLRISEKVVELPEFLTYQILADHANTSKSYTSKVLGHLREDGILESQKKPWRINDVQKLQKLIEMNVPLVKIQKKLRADLHS

SEQ ID NO: 2759 - protein, 229 aa, Listeria monocytogenes
MQSVFEDLYSKKILEEEFGYTCFLQTLIDNRIPYKKTRIPSNMILLTEDTINTKVYFIEKGIVSLEKNKNVISFLGSNQIAGLNDYFMAEANLYTARVIETITAYEFDKEDIICSIIGMQEGWLYLYLNNRNHENVLIEKCNLMRGNGENRLKESLEQLGRYFGNEKEGVLRIPKCFTKKIIANYSNLSVRSVTHLCRKLVEAGFLAENSKSFVLLDKYGKIEPEVTTI

SEQ ID NO: 2760 - protein, 261 aa, Listeria monocytogenes
MATLKIQDLHVEIEGKEILKGVNLEISTGEIHAIMGPNGTGKSTLSSAIMGHPKYEVTQGTITLDGEDVLEMEVDERARAGLFLAMQYPSEISGVTNAEFIRAAINSRREEGDEIPVMQFIRKLDAKMDILDMDEEMAERYLNEGFSGGEKKRNEILQLLMIEPKLAILDEIDSGLDIDALKVVSKGVNEMRGEGFGCLIITHYQRLLNYITPDFVHVMMQGKVVKEGGPELAKRLEAEGYDWIKQELGIELEEEEAVDQQ

SEQ ID NO: 2761 - protein, 433 aa, Listeria monocytogenes
MAQNMTIKDDFIHAFSSNANEPDWFLDIRRNAFKAYGELDLPFVDKTKITRWNFTKFETFIPFKEGVTNETLPEKVANLVDLDNKEANFYVQMDERPARLQLQQELVDQGVIFTDIISAVKNHPELVKKYFMKDAVQVNEHKLTAFHAALVNGGIFLYVPKNVEVKSPIQAVFVQDKAESPLVNHVLLVADDNSAVTYVENYVTVNNEPKGIVSIVEEVIAEKNARITFGGVDNLASEVTAYVNRRGHIGTDSQIEWALGLMNDGDTINENVTNLMGDGSSADVKTVTVGRGKQTQNVTTRVTHYGKASNGTILSHGVMKERATTIFNGIGHIKHGASKSDAQQESRVLMLSPEARGDANPILLIDENDVVAGHAASVGRVDPLQLFYLMSRGISQKEAERLVIHGFLDPVVRQLPIESVKTMLREVIEGKVR

SEQ ID NO: 2762 - protein, 408 aa, Listeria monocytogenes
MIDIQKIRADFPILAQEINEKPLAYLDNAATSQKPKQVIEALTHYYEFDNANVHRGVHTLAARATDAYESARGKVAKFIHAREVAEIIFTRGTTSAINLVVDSYAEANIEAGDEIVISYLEHHSNLIPWQQLAKRKGAVLKYIELEEDGTISVEQAKKTIGEKTKIVALAHVSNVLGTITPIKEIAAIAHQFGAVILVDGAQAVPHMEVDVVDLDADFYAFSGHKMMAPTGIGALYGKRELLDAMEPTEFGGEMIDFVELYDSTWKELPWKFEAGTPIIGGAIALGAAIDYLAEVGLENIHAHEQALASYAMEEMSKIEGITIYGPKDASKRCGLVTFNLEGAHPHDIATILDEDGVAIRAGHHCAQPLMKWLDVSSTARASFYIYNTKEEIDALIDGLKLTKEYFGL

SEQ ID NO: 2763 - protein, 147 aa, Listeria monocytogenes
MTSRKLDQLYRQVIMDHYKNPRNNGELPDSDVTIDLNNPTCGDQIHLHLKMDGDKIVAAKFTGSGCSISMASASMMTQSIIGKTEKEALKMSREFSEMVQGHDHETIDEYGDVEALAGVAKFPARIKCATLSWKAMERAIFEKEGTK

SEQ ID NO: 2764 - protein, 464 aa, Listeria monocytogenes
MTEIPEIGEYQYGFHDKDTSVFRTERGLTEKVVREISNIKEEPEWMLEFRLKSLEQFYKMPMPTWGGDLSELKFEDITYYVKPSEQTVRSWDEVPEEIKRTFDKLGIPEAEQKYLAGASAQYESEVVYHNMKQDLEDLGIVFKDTDSALKENEDIFKEYFAKVIPPSDNKFAALNSAVWSGGSFIYVPPGIKVDTPLQAYFRINSENMGQFERTLIIVDENASVNYVEGCTAPVYTTNSLHSAVVEIIVKPGAYCRYTTIQNWANNVYNLVTKRTFCEENATMEWIDGNIGSKLTMKYPAVHLRGEGARGTTLSIAIAGKGQRQDAGAKMMHYAPNTSSTIVSKSISKQGGNVTYRGIVHFGRNADGARSNIECDTLIMDNLSTSDTIPYNEILNSNISLEHEAKVSKVSEEQLFYLMSRGLSEEEATEMIVMGFIEPFTKELPMEYAVEMNRLIKFEMEGSIG

SEQ ID NO: 2765 - protein, 183 aa, Listeria monocytogenes
MKLKEGIFFKIVICFVTIFICLTPLSTSVSAHASVNREDGKEGNTLEQTVSVDKENPDLFVNQSVENNGPKRLFANQTESGGSKYKFVTKQTVSLAAANNIYSLAFLAAGGALGRVAKSTIAAAASSIVGGGASLLKKYNYMRQTIYKYSTKKEDKYKVINEYLYTKNGKPGKITTSYSTVRK

SEQ ID NO: 2766 - protein, 137 aa, Listeria monocytogenes
MRKYSVKKFSIVFISMIAAILLFSIISEESFVVTPLNLFTAVLIAASAYIITGLFTPKEKLIGEMKEEKRNADERYIFNKGKISYFFLLFLAILTPFLLAFLKYRNISSVSIKSLAIIFVCIFCLYIVVLQFYKKKK

SEQ ID NO: 2767 - protein, 104 aa, Listeria monocytogenes
MAEIKYLEGMYQDSFFPTFLVDKLKQYMFDTVQFLEQGNHDTEAIQAKFDEMTLAINALQDEFYENESELETGARDSIAETIIPILAHYKIDIDIEELLREREW

SEQ ID NO: 2768 - protein, 280 aa, Listeria monocytogenes
MVTIGLTGWSDHDSLLQTKKLTLADYAAHFPVVEVDTSFYAIPSPRTTANWAAQTPDDFRFVIKAFSAMTKHKEWSQYFDSENAMYTAYMDMIAPISETGKLQAILFQFPPYFNCTKENVTYLKYIASKMGDLPVAVEFRHNSWYNEQNTEKTLDLLRELGFIHTVVDEPQVGAGSVPIVLRETNSDMTLVRLHGRNQYGWMKANSPEWREVRTLYRYNEEEINEWAKYVEHLQKLSKEVVVIFNNNSGGDAADNAKHLQKALQVEFQGLAPMQMDLFSE

SEQ ID NO: 2769 - protein, 121 aa, Listeria monocytogenes
MAEKKEEMYRVELIVSALLRIGVVLSAIIIVFGLVMLFITGESGYPGETYPTSLTAIFSGLGTLKPYAIMMFGLFCLILTPVLRVVVSLFTFLKEKDYLYVGITGIVLIILVISFLIGIKA

SEQ ID NO: 2770 - protein, 279 aa, Listeria monocytogenes
LDITQTVEILLISVFAGVVGSLLGLGGGIIVTPALTLIFGIDIQYAIGASIISVIATSSGSAIAYIKDGITNLRVGMFLEIATTIGAITGAFVSGLLSATALYIIFGLLLLYSAFNMIKKVGTEFPTNVKPDPLATKLNLHDSYYDKSLRQTVDYQVANVPAGFGVMYGAGIASGLLGIGSGAFKVMALDVFMKMPLKVSSATSNLMMGVTAAASATVYLFQGDIQPAIAAPVAIGVLVGATLGTRIMQRLKSKVIRIIFIPVILYVAFQMILEGLGWI

SEQ ID NO: 2771 - protein, 463 aa, Listeria monocytogenes
LMKHLTLWHTNDVHSHLEHWPRIFNFLKEKRTAADKENQSALFFDIGDFLDRVHPLTEGTNGLANTDLLNQLPYDVVTFGNNEGTTLAHEDLDKLYEHAVFPVVCCNFYTNKECTEQPDWVKSIVYKEIEQVKIAIIGATAPFRDYYEEMGWGIEEPISSIKKQVAGLDEDTDVVILLSHLGLPSDERIALEIPEVDVILGGHTHHLLETGKIEGNALLAAAGRWGEYIGKVDIELDENNQILTKTAMTFKTEDLPAAPNEANEIQGFFDKGRAELSEKVVAIPGKLAHNWFDDSEIAHILNEAVCEWTGAETFVMNAGIFMTDFEAGIVTDFDIHQMLPHPLNAIALTMSGEELEILIDGIYRKKAELQDIPLRGFGFRGEYFGTVLMERAGFDAENQVALFDNKPIDKTREYRIATHDTFVFAPFFPIVKQIKRKEVYTPELLRDILKWKLKKMYGQEEDK

SEQ ID NO: 2772 - protein, 91 aa, Listeria monocytogenes
VTITIQDLNYEIITNYRDAFDEEKLNERFSDILGRYDYIVGDWGYDQLRLKGFFEDDNRKAAYDNKISTLKEYIYEYCNFGCAYFVIKKVK

SEQ ID NO: 2773 - protein, 255 aa, Listeria monocytogenes
LKNYKAYLIDLDGTMYRGAEVIPEAIIFIENLKRAGLPYLFVTNNSTKTPGQVAEHLTDMGIQAVSDDVFTTSQATVQFMMEQKREKTVYVIGERGIKQELTDNGFEITSSNPAFVVVGLDREVDYEKFSKAALAVRGGAMFISTNGDAAIPTERGLLPGNGSITSVVSVATETAPIFIGKPESIIMEQALAKLGVHKDEAIMVGDNYETDIMAGINYGMDTLIVHTGFTSKEALLTKEIQPTYAVTKLTDWEFN

SEQ ID NO: 2774 - protein, 147 aa, Listeria monocytogenes
MVSIRKVTKDNFHETAKLEVHPHQKTFVAENWYSIIEASFEETYHSLVIYADNMPVGYAMYGMDTDDGEFWLVRFMTGKEHQGKGYGGDALEQIIEMVKNLPEQPARLRLSYEPDNIVAEKFYAKYGFEKTGEIIDGEAVADLWFKR

SEQ ID NO: 2775 - protein, 590 aa, Listeria monocytogenes
MQKTRKERILEALQEEKKNKKSKKFKTGATIAGVTAIATSITVPGIEVIVSADETAPADEASKSAEANTTKEASATATPENTAKQTVGPQQTETKEQTKTPEEKQAATNQVEKAPAEPATVSNPDNATSSSTPATYNLLQKSALRSGATVQSFIQTIQASSSQIAAENDLYASVMIAQAILESAYGTSELGSAPNYNLFGIKGAYNGQSYTKQTLEDDGKGNYYTITAKFRKYPSYHQSLEDYAQVIRKGPSWNPNYYSKAWKSNTTSYKDATKALTGTYATDTAYATKLNDLISRYNLTQYDSGKTTGGNSGSTGNSSNTGNTNTSNAKIYTVVKGDSLWRIANNHKVTVANLKAWNNLKSDFIYPGQKLKVSAGSTTSDTNTSKPSTGTSTSKPSTGTSTNAKVYTVVKGDSLWRIANNNKVTIANLKAWNNLKSDFIYPGQKLKVSAGSTSNTNTSKPSTNTNTSKPSTNTNTNAKVYTVAKGDSLWRIANNNKVTIANLKAWNNLKSDFIYPGQKLKVSAGSTTNTNTAKPSTNNPSNSTVKTYTVKKGDSLWAISRQYKTTVDNIKAWNKLTSNMIHVGQKLTIK

SEQ ID NO: 2776 - protein, 436 aa, Listeria monocytogenes
MDVFNDFFVIFLIAATAFFVASEFAIVAIRKPTVLQLVASEDPRAKYVKKVTSNMNDYLAACQLGNTLAALAMGWVGEATMRGWLEPLFLMLPVPESVEKPISIFVSFILITFLNVVLGELAPKTFTIQSTEKVALFIARPLVYWYRLTFPLNWLLNNSANLITRMFGVKQTVDADQMTPTELKIIFEDSYRQGLLNPQEFRYMKNIFKLGDVPAKEVMIPRMSMIAIDQTATVRDLLKLTSEHTYHIFPVTEDEDKDHIIGMLRVSAVMAGLGKDETIVTQSIQPFITPVLEVFEGMILEELLVKMQQESEPFVVLTDEYGGTSGIVTLEDVMEVIVGDMEEAKGPKGIRKVALNHYIIEGSEPLLEVEEALGVPIEGPGVHTLSGWMLLERFDLEAGDEIEHEGYRFIVRSMNKNSIRQVEVKLGKEKPVKLEE

SEQ ID NO: 2777 - protein, 166 aa, Listeria monocytogenes
MVEKQSALESKARSWLIERGVEIDDIAELVLFLQQKYHPGLELEICRQNVEHVLRKREVQNAVLTGIQLDVMAEKGELVQPLQNIISADEGLYGVDEILALSIVNVYGSIGFTNYGYIDKVKPGILAKLNEHDGIAVHTFLDDIVGAIAAAAASRLAHSYHDDIVN

SEQ ID NO: 2778 - protein, 78 aa, Listeria monocytogenes
MEEISYAEVDKALKKFRPFLVRDGGDYELIEVTQDGIVKIKLLGACETCPSSDMTLKMGIELTLAEKIIGFKEVVQVF

SEQ ID NO: 2779 - protein, 60 aa, Listeria monocytogenes
LCGGRTLQEGLHARFARMHIWAVTRYTSNGPNKNTFLRLRKERALSTGKVERQLGCAPNC

SEQ ID NO: 2780 - protein, 108 aa, Listeria monocytogenes
MVNEAKLYVYGSTTICASCVGAPSSKETEEWLRAAIGRKFSGQPFVVEYVDIFNPPNETALADMANKIVEEDYMYPVIVVDGEIIAEGNPRLKDIYQVMTDRGYLATM

SEQ ID NO: 2781 - protein, 209 aa, Listeria monocytogenes
MNVLVIGANGKIGRLLVEKLAMEKGFFVRAMVRKAEQVSELEKLGAKPIIADLKKDFHYAYDEIEAVIFTAGSGGHTPASETVNIDQNGAIKAIETAKEKGVRRFIIVSSYGADNPENGPESLAHYLKAKQAADEELKKSGLDYTIVRPVGLSDDPATGKIAEVSGKPKTNIPRADVADFISEALSEKSSFYKTYTIESGDTPIKQFFN

SEQ ID NO: 2782 - protein, 109 aa, Listeria monocytogenes
LKLIFAIVQDQDSNRLSDALTKGNFGATKLATTGGFLKAGNTTFIIGTEDERVEDALAIIKENCKAREQMMTPSASLGVTVDTYVPYPIEVQVGGATVFVMPVESFHHF

SEQ ID NO: 2783 - protein, 331 aa, Listeria monocytogenes
LDEKTKIYDITIIGGGPVGLFAAFYAGMRNASVKIIESLPQLGGQLSTLYPEKYIYDIPGYPSVRAQELVNNLIQQMKPFDPTVALEEAVQSVEKQVDGTFEIITKKDTHYSKAIIITAGNGAFEPRRLDLPEAEQYEGTNIHYFINDLSRFSGRRVAVCGGGDSAVDWALMLEKVASSVAIVHRRNAFRAHEHSVNNLEKSSIAIKTPFIPTEVLGNGDKLTHITLQEVKGDTTETLEIDDFIINYGFVSSLGPIKNWGLELERNSIVVNSKMETSIPGIYCAGDICTYDGKVKLIATGFGEAPTAVNNAMNFIDPKTRVQPMHSTSLFE

SEQ ID NO: 2784 - protein, 403 aa, Listeria monocytogenes
MSKPKIVILGAGYGGLKTLRKLQQRNLEAEIVLVNKNDYHHETTWLHEAAAGTIEPEKLMYPLDKVVNDTKTTFIQDTVVKINKDEKTVTLDANGDISYDYLLIALGSEAETFGISGLKEYAFTITSVESVKKIRAHIEAQFAKWKTDPRDELLTIIVGGAGFTGIEFLGELTNRIPELVKQYDVPREKVRIYCMEAAPKVLPQFDAKLVDYGVGVLEDRGVEFHVGKPVKEATADGVKYAESENEVREIKAATIIWAAGVRGNSVIEASGFEAGRGRVKVNNNLTVPGNEEILIVGDCSLIINPANDRPFPPTAQIAMQQADVAAVNLAKLVKGETDLQDFVYHEKGTVCSLGDNDAIGVVFGKNLKGYPASVMKKVIDDRALLLIGGSGVLASKGKFKFYK

SEQ ID NO: 2785 - protein, 272 aa, Listeria monocytogenes
MEQLFDILPSEWAERFLETEKERMELHFKDAGKLSLLQSKAGGRGYLPKEQGYPVTEEGKPLSLLTQINFSEMPQMENYPEFGLLAFYVDYQDDLYGLNFENPTSQEGFRVFFFDDLGSESLTAEEQDAFFEDVAKTDFYPVVNGEFKIAGQVSDQILLQDSFDFENEFGSNFYELADQIFAEDEDKSEALYQIGKECSQIGGYPFFTQEDPRMYTENPHHDTLLFQLASEDFDENRMAIMWGDCGVGNFFINKQDLINRDFSNIMYNWDCS

SEQ ID NO: 2786 - protein, 408 aa, Listeria monocytogenes
VKKVTLIFSVYTFILGILVGVIAALFLAMVHFATTFLWDYLPNQFDFSWYYPLLIGLIGSFFVGMVQLKLGDYPRSMHDNVAEAKKTGRMEYRKVLLPTILSAWIILTFGASVGPEAALIGIVGGATTWIIDHLKLSMAHKEELVSLSVGAIISSIFHAPFSGLAEEIDESSQAKKIPKNSKLVLSLLISFSALGSFLWLKSFLKMPASIFAIRLPDMGWSWWFILLFIPTIILGWLFSVYFQQLQVYIAKAASVIKNKMVAAIIGGLSIGLFGIISSFMLFSGEHQLIELTTTVQNYSIPFLLIIALLKPVLVAICLATGWNGGAIFPAIFTSTVMGYIATYWIDGSTGFLITVFVTACCTKIVGKPVLTASILLFIFPLQFFPFILLTAFIVNKNWWVSIRKIIRA

SEQ ID NO: 2787 - protein, 157 aa, Listeria monocytogenes
MSIFTNTPLIASIIAIVFAQVVKVPIHILVYRKFNLGLMFSTGGMPSSHSAAVTALMTTLAIEYGLDSPYFAISVVFGIIVMFDATGVRRQAGEQAVVLNKLVTDFQDFVEHAKGLAAPEQEEKTKHLKELLGHKPMEVFFGALTGIAIGFILEMFM

SEQ ID NO: 2788 - protein, 123 aa, Listeria monocytogenes
MGLQETIGIEIVSVEKGKAVVQLEVTEKVHQPFGYLHGGVSVVLAEHAASIGAAKSIEPDEIVFGLEINANHLASKQAGLVTATAEAIHIGKSTQVWEIKITDETEKLLCISRCTIAVKKKRK

SEQ ID NO: 2789 - protein, 208 aa, Listeria monocytogenes
MKAIFITLEGPDGSGKTTVGTLLNQKMTEAGIDFIKTREPGGSPISEKVRNIVLGIGNEEMDPKTEVLLIAGARRQHVVETIRPALAAGKSVLCDRFMDSSLAYQGAGRDMNMEQVLQVNLYAIEDTLPDRTYYLDVPAEVGLARIAANKGREVNRLDKEDITYHEKVQAGYEKVINMFPERFMRVDATKTPEEITETILADILRQLA

SEQ ID NO: 2790 - protein, 197 aa, Listeria monocytogenes
VNVIIEIIISIMIIIGGLLSILAAIGVIRLPDVYTRTHAAGISNTFGVSLLLFATVGYFFHSGEGFNARVLLAVLFIFLTTPVASHLINRAAYDTGVPLAIRIRDQLRSVKKDDIKKKKSLIIRQEQIEKARQEREELEERMEWERREEKIDEREDQEEQEREREEQTIEEQSDDSEHEIIEQDESETESDDDKSEK

SEQ ID NO: 2791 - protein, 95 aa, Listeria monocytogenes
MIIQIALSIGLLLYSISTFLYLYRILKGPTTSDKVVALDSIGMNLVAIVALLSMFYDTHAFLDVILLIALLAFIGTVSFAKFIEKGKVIDRERDN

SEQ ID NO: 2792 - protein, 159 aa, Listeria monocytogenes
MAFQLILNIILACLWMFLESSFSFATFIIGFIIGIFLLFFMRRFLGSRFYLFRLFALVKLVFRFLHDLIVSTVHVSRIVLKKDMNIRPGIFRYDTTLETDWEVTMLALLITLTPGTLSIDISDDYKAIYVHSLHVPNIEEEIATIRKSYEGAIMEVFHG

SEQ ID NO: 2793 - protein, 494 aa, Listeria monocytogenes
MNNIILMPILIPFLGAITLMLLPKRVIVQRVFALIFSGILVVATIGLVFYIRENGITTVNIGNWAAPFGITMVGDMLAVLLTATTSIVLFCVILYSFYTIGKPREKFLYYPAILFMIVGVNGSFLTGDIFNMFVFFEVMLMASYVLLVIGGTQVQLKATIKYLLINVVGSGFFVVAIALLYSMIGTLNMADISQKITDLNGANTGMISIVAVLFLFVFGLKAGLFPLYFWLPGSYFAPPIPVLALFGGLLTKVGVYAIIRTYTLFFSSLTDFVVPLLGILAIVTIILGVIGAISYYDMKTIVIYNIMIAIGVILFSVSIMTRESMTGAVFYLIHDMIIKAALFLIVGIVMAITGYSSVKKFSGLMSVKPSLGWIFFIATLGLAGIPPLSGFIGKLLIVEGAFSAGQMVGGIIILLSSLFVLMSLIKVFTKGFWGEKKGVFNLQIPYKKMLVPVVILLAISIGYGVFSNAIYPFIEQAVDPLVDPSVYIHAVIKE

SEQ ID NO: 2794 - protein, 115 aa, Listeria monocytogenes
MELLMSILIGLIFAAAVYLILSKSLLRIIIGTAVLSHGVNLLVLTMGGLKKGRVPILGTPGAGTYNDPLPQALILTAIVISFGVTAFFLVLAYRAYQELDSESVSKTRGHEADDE

SEQ ID NO: 2795 - protein, 141 aa, Listeria monocytogenes
MMKTNDVLLRNVTKVVAFIIFLFSLHLFFAGHYNPGGGFVAGLTTAGAITLTLLAYDTKTVASMLNINTIMLTGVGLVFALGTGMIGIFTGDPFLTHKFGHVDLPILGDTALHTATLFDLGVYLVVVGVTLTIIQTIGESD

SEQ ID NO: 2796 - protein, 802 aa, Listeria monocytogenes
LSFLHLAIVLPFIVALLIPLFYRWTKQVHTGWLVLPIPVILFIYFLTFIPKTMEGATIVSMPWIPRLEINFTVVVDGLSLLFALLITGIGSLVTFYSIYYLGKKKERLSNFYTFLFIFMTAMLGVVLSDNLIVLYLFWELTSISSFLLIGYWYHRERSRYGARKSMMITVFGGLMMLGGFILLHIMSDSFSIREIISNADVISNNSLFIPAMILVLLGAFTKSAQVPFHIWLPDAMEAPTPVSAYLHSATMVKAGIYIVARFTPLFASSGVWFWTVSLVGITTLFWGSLNATKKNDLKAILAYSTISQLGLIMALLGVGAASLHFDTLSDDIYVMAIVAAVFHLFNHATFKGSLFMMVGIVDHETGTRDIRRLGGLMRIMPITATIAFIGTFAMAGIPPFNGFLSKEMFFESMVNITQLQLFDASTWGVLLPVVAWVASVFTFVYSMIIFFKTFTGKVKPYLLPKKPHEAPFGLLLPPIILSIFVVGIGLFPNLIAEPILEPAVRAIVPGLATDFSIHISLWHGFTPALLMTFGVVAVGIVLFLTHKYWKPWITTRVPKALRIGKTYDNGMYYLEQGSYRMTMFIMTGWLRTYLNYMLSAFILMMASVMIFTQALDFNFSSMTKVTVVDFVLAAVILVTLVGIVFSKSRITSIILLGAMGYTISIFFVISRAPDLALTQLIIETISVVLYLLVFYHLPQFSNIEEKPKWLSMKTFLSIGVGVIITLVSLSAYNTTFYDSISKYYVDNAYVEAAGRNIVNVILVDFRGFDTMFETAVLSIAAIGIYAMIKLRLTKRGENDENE

SEQ ID NO: 2797 - protein, 403 aa, Listeria monocytogenes
MTTRTRNLYILMLANLLMSASMTMIMPFLSLYIETFGDYSNAYVQRWAGYIFGVTFLIAFIFSPIWGRIGDKHGYKGILILTSVGLSICIFLMGFAHSVTYLLILRIFMGVVTGFIGVSNAFIARQTPRNEAGKVLGTLQLGGVTGMLFGPLIGGAMADLFGFKDTFTITGIAMMVAALIVAFGVKEIRTEEQKEAAKVVYSRRAVLKQIFTLRVLFTVMVITALIQIANFSVQPLLALYVGDMTQSDNIAFLSGLAFSATGFGNLVMTRKWGQLGDKYGYEKILNILLIMAAVFVIPQAFATNLWVFIFFRFLFGIAIGGMVPCTTAYIRLAAPGVMQGEMLGYNQSARFLGNVIGPILGGTLAGFTGIPSVFLFMSFMFLVAFFILLYALRSDRKRHVNVD

SEQ ID NO: 2798 - protein, 194 aa, Listeria monocytogenes
MTYPQLSKEVAPNEIEAEMITNRGTIRIKLFPEIAPKTVENFVTHSKNGYYDGLIFHRVIPEFMIQGGDPDGRGTGGESIWGESFEDEFSTEAFNLRGALSMANAGPNTNGSQFFIVQKPDMPADMLGQMEQAGFPVEVIEAYKQGGTPWLDGRHTVFGHVIEGMDVVDEIANLPTGMQDKPVNDVVIEKINIK

SEQ ID NO: 2799 - protein, 459 aa, Listeria monocytogenes
MRNQSKMPLVERLDAHAKSCPISLHVPGHKSGAIYPDAWQKLLKWDVTEITGMDDLHHPEDVILEAEELLAECYGSKKSYFLVNGTSGGNVAVIMATLKRGEKVLVPRDAHKSILHGIELAGGEPIFLTPATNKEVGVASGVTTELLEETLHNHPDVKLCIFTYPSYYGTTFNLQKCIRIAHDFGAVVFVDEAHGAHFLTSSEFPKSAVELGADVVVQSAHKTLPALTMGSYLHVVNDLPIFEKLAYYLQVFQTSSPSYLIMASLDAARKYVATYTAADVEAFWKMRARWIKWLTKNKFEVILPDDPLKIIVRKTGYTGYELQAIFEESSYFPELADESQVLLILPLIKKGIDFTPISRIHSPMKKEIAKEPYEMSTPCASGLALTYEEMHARATEFVLLDEATTRVSAETISLYPPGIPAIIRGEGITEKHIRELKNIRTRHYQGGEKLAENYIRVFR

SEQ ID NO: 2800 - protein, 131 aa, Listeria monocytogenes
VETSHPIKINNQLIYGRDKTWLESLHQNTNQLILTIEIDFEDESKLQKMVFNGLIFYSSTELDTYEKSKWSTSWLTSQSNFEIIEQSDLINERVKIRSDYNIQDFKHYRISTYDYIIDVIAKTYQLKEAHK

SEQ ID NO: 2801 - protein, 453 aa, Listeria monocytogenes
MKVIKFGGSSLASGIQLNKVFQLVAEDPDRKIIVVSAPGKRFKEDTKVTDLLIDCAAKALLGEDTSELFESVIARYAGIALDTGMSDEIINQIRADLQATISSDKSDPDKFLDRMKASGEDNNAKLIAAYFKFKGLNANYINPKDAGLLVTDEHASAQVLPESYDRLFALREREGIIVFPGFFGYTKDGEISTFSRSGSDITGAIVANGAQAELYENFTDVDAVYAVNPTIVKNPKKVLELTYREMRELSYAGFSVFHDEALIPAFHAGIPVHIKNTNNPDSCGTRVVHERENNNGPVVGIASDDGFCSIYISKYLMNREIGFGRKVLQILEDAGLNYEHMPSGIDDLTIIIRENQFGEDTERTIMSRLKEELNADQVIMQHGISLIMVVGETMRHNVGITSRASKALSDAKVNIEMINQGSSEVSIMFGVKEEQENTAVRALYNEFFSEVFV

SEQ ID NO: 2802 - protein, 104 aa, Listeria monocytogenes
MKNIVLVCAAGMSTSLLVTKMRKAAEERGETCEIEAYSIAEVSNLIDDADVVLLGPQVRYQKKTVDELAAGKIPVDVIDMAAYGTMNGEKVLGQALDLINGFQK

SEQ ID NO: 2803 - protein, 226 aa, Listeria monocytogenes
METLLSFEKVYKDYPSGPSIIHALKETNFEAKKGELIAIVGPSGSGKSTLLSLAGALLTPTGGTISINGKSVGNLSSKEQTALRLEEIGFIFQAAHLVPYLHVKDQISFIGKMAGKSAAELEKDTASLLSQLGISDRANFYPKDLSGGQKQRVAIARALINQPSVILADEPTASLDTERSREVVELIRNEVVQTSRTAIMVTHDERMLDLVNHVYRMEDGILTQES

SEQ ID NO: 2804 - protein, 367 aa, Listeria monocytogenes
MFLGLRELVYSKLRYILVTGIMVLIMLLSLILSGLANGLAYDNASSVADNGVPYYVLSKDAQDKLSRSQFPESKLADVKKDANVKDAAVLGQSMQTLKRESDDKKFSVALFGIQPDSFLAPKISDGANIQVTKPDEIVVDSSLKSDGIKIGDVLMDDILNRELTVVGFTENQKYSHAPVVYINIATWQEINPVLYHQKIPQTSTIAIKTENPDKGVTLTDKDLTTIDHKEFLNQIPGYSAEQMTLNMMIFFLIIIGGFILTAFFYVMTLQKTTQFGILKALGTKTSYLVKSIITQVVIISIISILISVGVTLILPSIMPAAMPFRLSPMTIALYSGLFFLVALFGALLSLRRIAKVDALDAIRGGDE

SEQ ID NO: 2805 - protein, 388 aa, Listeria monocytogenes
LSQFDEVIPRIGTNSEKWDGAEELFGRKDIIPMWVADMDFRAPKPVLDAFQRQIDHGIFGYSTKSKALVEAVIDWNKEQHQFEIDPSTLFFNGAVVPTISLAIRSLTNEGDAVLMVSPIYPPFFNVTKATERKVVMSPLIYENRQYRMDFNDLEKRMKEENVKLFLLCNPQNPGGRCFTKEELVELAKLCEKYQIPIVSDEIHADLVMKNHKHVPMMVAAPFYQDQIITLMAATKTFNLAAIKASYYIITNKDYQTRFAAEQKYATTNGLNVFGIVGTEAAYRHGAPWLKELKEYIYSNYEYVKAELEKEVPEVGVTDLEATYLMWLDCRALPKDEKTIYTDLIEAGVGVQMGSGFGHSGKGFVRFNIACPKETLEKSVKLLIQGLKK

SEQ ID NO: 2806 - protein, 117 aa, Listeria monocytogenes
MSTFKVGDVVSGKVAGIQSYGAFVALDNSTQGLVHISEITHGFVKDIHDFLEVGQEVKVKILDIDEEKNKISLSIRATEEAPKEQPTKKKQVSSSENDEGFNTLRDKLEEWIKKADK

SEQ ID NO: 2807 - protein, 135 aa, Listeria monocytogenes
VKRSIHVQAFVYNEKKDEILVVRDRNLTWAFPGGHVETNQTMEEALASKVKEQTNIDIEIESILHCKERRATWEHVCTFVFRAKPVGNALLASNDDNVFRVKWIPIPLADDLLAVDQLSLNELVRSEGVLYENYT

SEQ ID NO: 2808 - protein, 450 aa, Listeria monocytogenes
MTHIKFDYSKALRFFEERELDYLEPAVKAAHDSLHNGTGAGNDALGWINLPTDYDKEEFARIKKATEKIHSDSDVLIVIGIGGSYLGARAAIETLNHSFYNVLEKGARKTPQVFFAGNSISSSYLHDLIEVVGDRDFSVNVISKSGTTTEPAIAFRVFKELLIKKYGEEGAKKRIYATTDKAKGALKTLSDNEGYETFVVPDDVGGRFSVLTAVGLLPIAVSGVDIDALMNGAAAASKDFDKPELKNNIAYQYAAARNVLYRKGKVTELLISYEPGLQYFNEWWKQLFGESEGKDKKGIYPSSANFSTDLHSIGQYIQDGRRNLFETVIKVDKPRHNLTINKEDVDLDGLNYLAGETVDFVNTKAFEGTLLAHTDGEVPNFVVEVPELDAYTFGYLVYFFEKAVAISGYLNGVNPFDQPGVEAYKANMFALLGKPGFEDKKAELEKRLND

SEQ ID NO: 2809 - protein, 252 aa, Listeria monocytogenes
VLSIERKRAIVQYVKSRKIATVSELAKHFEVHEATIRRDLTSLEKDKKLKRTHGGVMIEEKVVSEPNWKKRSEVRYEEKQRIATLAATMVKDGDTIILDAGTTTGHIATALKDRSKLTVITNDINVASIMRFSPSKVIVTGGVIYPETFILNGMITSGTLQSIHVHKAFVTTPALDIDKGLMHYDEYLIPAKQQMLHSADEVILVTDHTKFGRISLYKYAALDEISSIITGKEIDPVLKEQFEEKGMQIYTT

SEQ ID NO: 2810 - protein, 402 aa, Listeria monocytogenes
MNVLQSMKMAWKQLKASKLRSFLTMLGIIIGVASVILLVSLGNGVTQEVDDQMGDLGSNLITVVNSSVNPNDKYTYDEVMKYQNIDGVKSVSPELSGQVNATFDYKNSSNKVIGTNDQYKAARSLEMKEGRFLLPIDTEYGQKVAVIGSTVASDLFGFGDPIGETIRLNGMPYKVVGVLKEKGASMMGSSDDQIFIPISSAQRLLKDTNVRTIYVETKSAEDVDFVVNTLESRLAIKFGDEKEQEKNASSAQMGPSYQVINQQEILNAFNTISTTLTTALGAIAAISLVVGGIGIMNIMLVSVSERTREIGIRKALGAKKRAILLQFLIESIVISVCGGVIGIIIGVSGALIFGSVAGISSGITAGTIIFSFVFSLCIGVIFGIAPANKASKLRPIDALRSE

SEQ ID NO: 2811 - protein, 230 aa, Listeria monocytogenes
MPKPLIDMKNLTKTYTLGGETFKALDDVTFTVEQGEFLSIVGPSGSGKSTLMNMIGCLDVPDEGSYHLDDVDVFKLSDNKLSEIRNKKIGFIFQQFNLLPKLSAFENVELPLIYAGLSVSAREKAAIECLEKVGLLEKRRNLPTQLSGGQQQRVAIARALAGKPQILLADEPTGALDSKTGKEVMGILQELNRAGNTIVMITHDPTIASYGTRSIRIQDGKLFHEEATQA

SEQ ID NO: 2812 - protein, 225 aa, Listeria monocytogenes
MKKWVKWLIVIVIIAVVAVGAVFLLSKNSGSVTQEKLVTAKVKQGDMKINATGTGAISPVNTQVPDYDELQLVAQMDELDIPNIKKDQEVKVTVTALPDKTYTGKVKEIAEQGQVQNGVSSFSVIISLDKTDDLKAGMTADASILVNEKKDALYVPIEAVQKDSDDKYYVLVPEEKDNGKTKKVKKFVETGLHNEDNIEITKGVKKGEKVILPTQETSTVPGAPS

SEQ ID NO: 2813 - protein, 272 aa, Listeria monocytogenes
MKIRRSERLIDMTQFLLSHPRKLVPLTMFAERYGSAKSSISEDLVIIKKTFEDRGIGTLETVPGAAGGVQYISIAGNDDVLDFVHTLCNRIAEPNRLLPGGYLYLSDLLGEPVTLKAIGKILATKFNNQKIDAIMTVATKGIPIAQAVAEHLSVPFVIVRRDSKVTEGSTVSINYVSGSSKRIEKMELSKRSLAEGSNVVIVDDFMKAGGTINGMKNLLEEFNAHLVGIGVLVESEYAEERLVDDYVSLVKIKNVNMKEKQIEVVDGNYFNS

SEQ ID NO: 2814 - protein, 245 aa, Listeria monocytogenes
MKIIFNADDFGISPGAVYGILESYKRGVVKSTTLLANSPAFDLAVEVAKENPGLDIGAHLTLTFGSPVLQGLETLTDDDGRFRRNYTSLENGLADVDMNEVERELTAQIEKILDAGITISHFDTHHSIEPLIYPVQHKLAEKYGVSIRRHSDVSDFGAIKTPDLFATEFYADGVSFETIKKLVQKHIGTNDVVEVMTHPAFIDETLREISSYVEPRIKEVSILTSRELQAYLGQQEVEIISFRDL

SEQ ID NO: 2815 - protein, 329 aa, Listeria monocytogenes
MKKILNGTDQVVEQMVEGLVKSHADVVHRVEGTRVIARNDKRPGKVGLVSGGGSGHEPAHAGYVGRGMLSAAVCGDVFTSPTPDQIYEGIKAADQGAGVLLIVKNYTGDVMNFEMAADLADADDIKVEQIVVDDDIAVEDSTFTTGRRGVAGTVLVHKIIGAAAEAGASLDELKALGEKVIASVKTLGVALSPCTVPEVGHPGFELGDDEIELGIGIHGEPGFTREKIMPSASLAKQLYERISNESKLLAGDKVVVLVNGMGATPLMEQYVFANDVHELLKNAGVQVEKTLVGDYMTSLEMAGLSLTILKLEDEKWVDMLKLPVDTIAW

SEQ ID NO: 2816 - protein, 293 aa, Listeria monocytogenes
MKISITAPAKINLSLDALYKREDGYHEVEMVMTTIDLADRLYLERLDEDKIVLDVKAHFIPEDRRNLIYQAALLLKKRFDVKMGVRITIDKHIPVSAGLAGGSSDAAAALKGLNVIWELGLSIEELAEISSEIGSDIAFCVYGGTALATGRGEKISALPNIPGCWIVLAKPSISVSTPTIYKELQVDNVEHPDTQKMIESIKNGDLDGIFAATGNVLESVTLEKNPQVKRIKDRMLAFGAEAALMSGSGPTVFALIKQYSRAKRVYNGLRGFCEEVYMVRPWSEGENDTNINY

SEQ ID NO: 2817 - protein, 85 aa, Listeria monocytogenes
MPKTIASIKTNLDSRLGKALTLKANGGRKKTIERCGILAETYPSVFIVELDQDENNFERVSYSYTDILTDAVELVFTDDNKELAL

SEQ ID NO: 2818 - protein, 295 aa, Listeria monocytogenes
MSKDIATPGRTTEILKKYGFLFKKSLGQNFLIDSNILTRITDTAEITKETNVIEIGPGIGALTEQLAKTANEVVAFEIDQRLLPILDDTLSAYNNVKVVHGDVLKADVEEVIAEQFAKPELPLKIVANLPYYVTTPIILKLLHDNIPADSMTFMLQKEVADRISAVPSTKSYGSLTIAIQFYMEAELAFIVPKTVFMPQPNVDSAVIHLKRRKEPLAEVNDEEFFFEVTRASFAQRRKTLWNNLASKFPALKPRKDELVEGLNAIGIDLIRRGETLDIPEFAKLSNFLGDFLKEK

SEQ ID NO: 2819 - protein, 191 aa, Listeria monocytogenes
MSGKPVIHEFIVVEGRDDTTAINRSVIADTIETNGSALSQETIEKIRHAQELRGVIIFTDPDFPGEKIRKQIDSAVPGCKHAFINRQDALPKAGRGLGVEHASSANIREALENFHTSGAPTEKQFISKDILVHLGLLGGVGAKERREKIGNILKIGYTNGKQLQTRLESFAISEEQLVAACQKIMQEEENE

SEQ ID NO: 2820 - protein, 408 aa, Listeria monocytogenes
MTMENSSNVAQSSKWKLPIMIAGFVIVVALVFYFVFEGTKNDITIVNAGEKIESRTHAKTVSEALDEAGIKVSERDEIAPGKNAEIKDGMEIKYLPARQITINDNGTKKDVWSTKANVADLLKDENITTRPQDVLNVALDTKLKNGLEVNINRAIQLSLQNGAKKDTVWTTKTKVSDLLAEKNIKLDQDDRVSPAKDSNLKEKMTVEVTYVNSKAEKKNEQVKFETVYKEDDSLNKGVEKVVQEGKNGKKVVEYKVTFENGKEKKRDVIKENVTSNKTDKVVVRGTKEKVVATPVSNVSTSSATSSSSSSASSTPSGGKTYKMESTAYSGGGTTAYGINLSANPGLKVIAVDPRIIPLGSKVWVEGYGEAIAGDTGGAIKGNIVDVYFPNESQCYSWGRRMVTVKVLN

SEQ ID NO: 2821 - protein, 257 aa, Listeria monocytogenes
LLFDTHVHLNDEAFDDDIEEVIKRAQENDVTRMAVVGFNKETIDRALELAEKYDFISLIVGWHPTDAITFTDEDLEWLRDLALTHPKVVALGEMGLDYHWDTSPKETQFEVFRKQIRLAKEVNLPIVIHNREATEDVVRILQEEHAEEVGGIMHCFGETVEVMEACLAMNFYISFGGTVTFKNAKLPKIAAQAIPIDRLLIETDAPYLAPTPNRGKRNEPGYVKLVAEKIAELKEMKYSEIATHSTENAKRLFRIKD

SEQ ID NO: 2822 - protein, 553 aa, Listeria monocytogenes
MKEKDWWKKSVVYQIYPKSFNDSNGDGVGDIQGIIEKLDYLKELGVDVIWLSPVYDSPQDDNGYDIRDYQKIYEEYGDMATFDQLLQGLHDRDMKLVMDLVVNHTSDEHKWFEESRKSKDNPYRDYYFWREENEINNWGSIFSGPAWELDEKTGEYYLHLFSKKQPDLNWENPKLRQDVYNMMKFWLDKGIDGFRMDVINFISKNTDFPDGPVPDGQIYGDAGNDFCNGPRIHEFLQEMNQEVTSKYDVMTVGEMPGASTTDAQIYTNPANNEVDMIFTFEHMNLDSDSDNKWDLKPIYLPDLKENMSEWQVALQENGWNSLYWNNHDQPRIVSRFGNDNRFRVRSAKMLATCLHMMKGTPYIYQGEEIGMTNVHFETLDDYRDIETLNMYKERKEQGHSHESIMQSIYTKGRDNARTPYQWDNSENAGFTTGTPWLKVNPRYTEINNEEALKNPDSIFYYYQNLIKLRKTTEIITTGNYRLLLPKDEAIFAYERYTENEKLVVLCNFTEEEQVISDETILNEIQKGSVLVNNVPNIIEGTLRPYEAIVYQIK

SEQ ID NO: 2823 - protein, 198 aa, Listeria monocytogenes
MTYDKDWALRWLNDFGERVQENKQLLSDLDQAIGDGDHGINMARGLGELKKAFTEKEPADLKDVFKTAGMTMVSKVGGASGPLYGTAFLNMSKAVDADTIDAVGLTKVIEAGLEGIEKRGKSHAGEKTMIDVWEPVVHALHQEDLTDDVVDAALQKTKDLKATKGRASYLGERSIGHLDPGAYSSALLFHAMLQTEVS

SEQ ID NO: 2824 - protein, 763 aa, Listeria monocytogenes
MDASTSFAILPSNVKQKTAFERKVNQVKAASWTNNCLTGTLDIGQFSCYFVNEKIARVTVNPFGEVDLTPSIAAIHDNEKQAAKFTETNDCYELHFADKEVIVCKNPFQIIMKQAGKRIFQTEGLAINRDKEHQISIQSEPGTAIFGLGEKTGALNKAGSIISMWNTDVYSPHNKDTVELYQSIPFMIADTAKTTYGLFYDNSHRTEFDFQSFEEMYTVLAEGGQANLYIIFGEDVKEVVANYTDLTGKTPLPPKWSLGYHQSRYSYTSEEEVERIANTFKEKEIPLDCVFMDIHYMDDFRVFTFNPDTFPNGPELIARLREQNIDVVPIVDPGIKKDVDYSVYQEGIKNNYFCTKLEGSIYYGDVWPGVSAFPDFLSTTVQHWWGSLHKFYTDLGIRGIWNDMNEPSVFNESKTMDLDVVHNLDGKNVTHKEAHNLYGLYMSKATFEGLKRLVPNERPFSLTRAGYAGVQRYSAVWTGDNRSHWEHLEMSLPMIMNLGLSGVAFTGADVGGFSSDCTKEMLIRWTQAGAFLPYFRNHCVQDSIYQEPWAFGADAEKIVKQYIELRYAFLPYIYTEFQKTAESGLPLVRPLYMEFKDERDLIQVNDQFMLGENILVAPIVREGQAKRLVRLPKGLWFNYWTKEQFVGGDYIIADAPIDTMPIYIKAGTILPVGSSVQNTKETQELTLEVYLDSETATGYVYNDDGKSYQYESGAVSKTTLTATFKNGEVLINATHQGEANLQQKVTTIQVFGEKIDKITRAGI

SEQ ID NO: 2825 - protein, 1100 aa, Listeria monocytogenes
MSKFTKLMQGYLHLIEGKNEKIKPILLETKPNFTTDSVLETASWLWLSSKINHYDREEVEPVIAFLVENWNRPEKSIWGSAENDIYLATISSVYSALLDVKNTFPKPELQQTITIIRDYCFDNLLKGDSILTGFNTRKVSTDQLLSVLPFGLFSPEDLVMVAAVGKMEQQLVQDDGVLPYSGAPRVNSFATALMALYFLEKSDQDKALHYLNMAMKMEDNDELGAIFIEINQAFRAMESEVTAHISHDPFGHENRYEQQLTERTPHYPETEMHFSAACEVISEVEPIQVELVLKEKDWTILCEKKEKNDVQIWEALVPPLEEVGEYTYYFQATMKDQTTLTSDDYKVEPIWKHWSEEAAICETEQGLMVLFKENPSSIIPVEFTVKSDELVIGLKPSFEASNVKTKSSGQLKKDDLEIIVSNNPVRLEVHFKGKLILESHKIYPALQWYTDKTGTINKVKLHLDAPKEEEYYGFGERYNALGQRGNVLDCFVYNQYRDQGTRTYIPMPFYHTNRDYSVFVDTARYTSFDLGNQLADKHTITVEINGCDTDICLLMGDIRSAVANYMKKTGKPAMVPVWALGPWMSSNNWDRESVVRNEVETTQELQIPSTVVVLEQWSDEATYYMFNDAEYDEKAPSEAYSYDEIRFPSWGRWPDPKGMVDYIHDNKMKLILWQIPIQKYLNRQQHPLKDREEAYMIEKGYVVKNPDGSPYRIPENWFTESLIMDFSNEEGKKWWFDKRQYLIDIGVDGFKTDGGEFVFGEGLQFADGRRGDEMRNLYPNDYVEAYYQFAQQNEGMTFSRAGYTGAQNFPAHWAGDERSTFDAFRRSLIAGLSAGFSGIPFWSFDFAGFNGDIPTAELFIRSAEMATFCPIMQYHAESKAEFNQDRTPWNIASRTGDDSVIPIYRHFANVRMNILPYIYNESLKCVETGLPMMRALLLDYKEDPRVSDMYDQYLFGEAMLIAPVIEDGVRSREVYLPEGTWYDFWNGTKVSGPTLRKCKADKEEIPVFVRGGKAVLCNVDATLKLGSWVGNTVEEYDTPLLKVYLDGDFTEEITDHLFGKWLVKVTENADEVIVSVQTNTASYEVEVIGTTKKVQIKKGR

SEQ ID NO: 2826 - protein, 418 aa, Listeria monocytogenes
MKKGLLLLMVVVLSVFGLSACGGGSSSGDKTEITYYQFSAPADGKALDEMVKEFEKQNPDIKVNVQTIAFNDYFTKLQTQIAGGDAPDAFELNYETFMQYAEKGVLADLTSYIEKDKDFDPSTLNKQAYDAFKYDGKQYGMVESFSNVVTIYNKDLFDKAGVEYPTADWTWKDEEAAAKKLTDAKNKVWGTSQPVTMNEFYKVAAQNGGSIFNEDLTETTINSPENVEALTHLTNEVTDSKVAPSPADLSGQLPEDLFMNGQIAMLHTGIWLFDMFQDAPFKWDVQVEAGNTQKATHFFANGIGVSKDSDKKEAAFKFASFMSANEEAAKIRIDNNWELPATENKEILQPYLDATPPDNREAVFESLQYMVLPPVVKDWNKISDYTNSEFEKVLNGDSTPEKALKNSEDNINKTMGFK

SEQ ID NO: 2827 - protein, 124 aa, Listeria monocytogenes
MAKPYGVVIISHSKDVAKGVHDIIKEIAPDVSITHAGGTEDGRIGTSFDAVNEAIENNEANKVYTFYDLGSAKMNIETVEEISEKEIILFNAPILEGAYATAAQVQMDEKPEVIAANLKTIEIK

SEQ ID NO: 2828 - protein, 282 aa, Listeria monocytogenes
MKTEKSGSPKWQLFKNILTYTIICLGGIIMLMPFVWMVSTAFKTGAANMVLPPQFIPKEPTTANFTQVFEMFPMLRFLVNSVIVAVVTTLGQMLFCSMAAYAFARIPFWGRDKLFLLYLATMMVPAQVTMIPQFILMKQFGWLDSYAGLIVPALFSVFGTFLLRQAFMGIPKELEEAAFMDGANHFTIFRKVILPLAKPTFATLGILTFMQSWNSYLWPLIVTSSQEMATLPLGLSLLQGRYGTNYGLMMAGVLISVIPILAVYLFAQKYFIQGMAMSGMKE

SEQ ID NO: 2829 - protein, 292 aa, Listeria monocytogenes
MVGMTRKKTLFWLCIFLLPNLLGFLIFIAIPILGSLGISFTDWDLVSTIHFTGFENYKRLFNDPEFWKSFRNTITFIIGYLPSVMILGLACALMLNQKIKLRPFFRAVYFLPVITSWVAVSLVWKWLFNPSYGLINYFLSLIGIAGPNWLTDPQTAMIAVIITSAWKDIGFVMVLFLGGLQNISPSYYEAANMDGASKLRQLFSITIPLLTPTTFFVTIISLINSFQVFDQVMIMTEGGPSGATMTLVQNIYNHAFRYFEMGYASAMSWILFIVIFIITIIQNKLQKRWSNY

SEQ ID NO: 2830 - protein, 404 aa, Listeria monocytogenes
MDILRKGNKDLIKDINRYTVLNLIREKGEITRTEIAKKCDFGMSTLTYILDDLQQEGIILEGAETSSTGGRRAKLVRFNKDYGFVVSVKVEEEQLLFALTDLNAEIIENTSIPFSSEKKPEEAIELIAKNVKKMCGNRDMNHLLGVGIAISGLVNRKKGTVIRSTMLGWENVALEAMLHAHFPDIPVYVDKNINCYTLAELWLGEGKQSNNFATVSVGAGLGLSVVINRQIYYGAQGGAGEFGHTTIQPGGYKCHCGQKGCLEMYASEFYFRNRGEELKEAYPTSELNDFHFDKVAKSARAGDEMATELMGKMGEYLGYGIRNIINTFNPEKVIIVGEGLHHRDLFLTKIDEIASQNFFSGAGFETEITTTSLEDPAWLQGAALLVIHQLFQVPIYEEEQTLLR

SEQ ID NO: 2831 - protein, 664 aa, Listeria monocytogenes
LPEEKNTFYITTPIYYPSGKAHIGHAYTTVAGDAMARYKRLKGYDVFYLTGTDEHGQKIQAKAKERGISEQEYVDEIAEGFQELWKKLEISNTDFIRTTQDRHKTSVEKIFEQLLEQGDIYLGEYEGWYSVSDEEYFTETQLEEVYKDENGKVIGGKAPSGNEVELVKEESYFFRMSKYADRLVEYYNSHPEFILPESRKNEMINNFIKPGLEDLAVSRTTFDWGIKVPGNPKHVVYVWIDALSNYITALGYNTDNDTKFQKYWPADVQIVGKEIVRFHTIYWPIMLMALDLPLPKMVFGHGWILMKDGKMSKSKGNVVDPYMLIDRYGLDALRYYLLREVPFGSDGLFTPEDFVDRVNFDLANDLGNLLNRTVAMINKYFDGEIPAYQGNVTEFDQILVDFKNNVVKEYEGSMDHMQFSVALNQLWSLISRTNKYIDETAPWALAKDEDKRTELASVMTHLAENLRIIAVLLQPFLTRTPGEIFLQLGLQEENLKKWDSIYGYGEIPAGTTVVKKGTPIFPRLDAEVEVTYIQDEMKGSAPAPAEEVAEVEALETPQIGIEDFDKIDLRVAEVKQVDKVKKADKLLCFQLDLGEGKLRQVLSGIAEFYQPEELIGKKVIVVSNLKPVKLRGLMSEGMILSGEKDGKLSVIEASSALPNGAKVK

SEQ ID NO: 2832 - protein, 286 aa, Listeria monocytogenes
LNIMIALIPALLWGTVPLIITKFGGSTRQQTMGMTLGALTFAVIVFFFTDPVYTLKTVGISFITGCLWTVGQMFQLQAFKIIGVSKAMPISTGMQLVGTTLCGVILFHEWDTTLRIILGFIALALIVGGIFLTSYAEKEEDGTNALKQGLITLFISACGYVGLVVLIQGFKIDGINAILPQAIGMVISALIMTHSGGTEKRFNKRTLLLTIPGVIWAAGNVAMVHANQLVGVATGFSLSQLGVVISTIGGIILLKEKKTQKEMLFVIVGVVLVVLGGILIGVAKGA

SEQ ID NO: 2833 - protein, 101 aa, Listeria monocytogenes; identical to SEQ ID NO: 257

SEQ ID NO: 2834 - protein, 173 aa, Listeria monocytogenes
KSTRHWKGSESSIFCFVSRRAKNKVSCQRYLSDTTSTFIYLLSLEKERFRTELIGEKIGQLCKTYQFTYGYRKIAALMKQEEQVGINKVQRIMQKYQWQCQVKVKKKNRPGSAYYQTENHLNRNFQASQPLEKLTTDITYLYFGDCRLYLSSIMDLYNGEIVAYSIGEKQTQN

SEQ ID NO: 2835 - protein, 283 aa, Listeria monocytogenes
MNILIKIRELTNLTNSEKELANYILANPKKTLQFKPKELATAAFVSAATIYRLINKLGLNGIGELKIEIASSLRETSEEKDLNYDYPILESDTPYQIMTNLHQIYKGTIDETLNNADPEELVKIGEKLIQAKTIDVYAASANLFFAQNFKFQMQEIGVLVNVPEEDYIQSLSAANSDENHIAIVVSYGGRSRTLQRVVKILSENNVDIILITSMQDNPLVEFATHKIYMASAENHYNKVSSFSTRQSLLSIFDTLYSIYFNQNYEKNIQYKTTNYQKMNTELE

SEQ ID NO: 2836 - protein, 128 aa, Listeria monocytogenes
WRNRCLLHWRKTDTELVLDTLNQLSLPEGSLLHSDQGSVYTSYEYYQCCKKKNVIRSMSRKGTPADNAPIECFHSSLKCETFYHKTAYKYAKSIVIQIVKDYIKYYNEKRIQQKLGYQSPINFRKQAA

SEQ ID NO: 2837 - protein, 421 aa, Listeria monocytogenes
LIMNANLEVNAELVKESYVYLLSRYLVLRQENFDTKEDKIPYNTLKHNSVSPADANFVNPNFDVVYSEAWIAVDDEHAVVLEVPEIKNRYYTVQLLDGWGEVVTNINERNFPEHPHGKFAFVKKGTNPSIPSDAIKIELPSEKVKVLLRVEQKDDPEGAVKLQKAFKFDAPDNIKIKEPLEIPHFTNAEFLLEEIYSNLEELLATYPDKMPKAAEFQDKARKVAAYIELGDDQKAEVRNLIVKEALPYFTNGAKGFGTQKGGWSVTYVAGAFENDILARAIINYGGIWANSIQEALYFIGQKGTDDELLTGDKIYKIHFSADELPAELANAFWSVTLYSVPDYHVIPNELNKFCINNYTGPKLSEDGSLTLYIASEKPADVDPGNWLPSKAGKEFSLNFRLYVPKKEVLEGKVFLPPLEVF

SEQ ID NO: 2838 - protein, 285 aa, Listeria monocytogenes
MNIVIALIPAVMWGIMPLVVSKIGGKPRQQIIGTTFGALAFAIGVFIFTNPEYTATIIIASFVSGAFWSLGQMNQFRAFTQVGVSKTMPLSTGMQLVGTSLFGVFAFHEWGTTSKLVLGFSALALIIIGIFLTSYQQHKDENSGQNMKKGIITLLISSVGYVGYVVITRWFDISGWDAILPQAIGMVVAGLLFSIKSEEKRFTKQTWLNMIPGVMWATGNLALLFSNKLVGIATGFSLSQMGVVISTIGGILFLGEKKTKKELILVIIGVVLVIIGGTMIGIAKS

SEQ ID NO: 2839 - protein, 94 aa, Listeria monocytogenes
MKSTGMVRKIDELGRVVIPIEIRRTMNLNVKDPLEIFTDEDAIILKKYSAGLVCDVTGEFSVDNKKFVDGKLTLSKEGAAALMEEIKRRFGDTL

SEQ ID NO: 2840 - protein, 279 aa, Listeria monocytogenes
MTTQAIILDIDGTLLNDDKQISPETKKALITAQENGVKLILASGRPTTGMHVYAEQLEMEKHHGLLVSYNGAKVVDCATNEELFNQALTVEEGKAVLEHMKQFEVKVMIDKEDYMYTNDVYDCYVPYRGEEINIIQYESRGGNFKLCEKDDLAAFLDYRLSKILTAGDPAYMQKNYQAMMAPFKDTLNCVFTADFYFEFTAQGIDKAKALDTVLTPMGIHAENVIAFGDGHNDITMVEYAGTGIAMQNAVPELKAAASSVTLSNNEDGIAHVLNSLIPS

SEQ ID NO: 2841 - protein, 293 aa, Listeria monocytogenes
VIKSQKSFSGTSQGALYLVPTPIGNLEDMTFRAIRMLKEADIIAAEDTRNTVKLLNHFEITTRMTSYHQFTKENKEDNIIQRMLGGEVVALVSDAGMPSISDPGYELVQSALDANIPVIPLPGANAALTALIASGLAPQPFYFYGFLPRQNKERTQAIEKLAAREETWILYESPHRLKETLKAIIKITGNDRKIVLCRELTKRFEEFLRGTVEDALNWAMDEEIRGEFCLIIEGNSNPQLAEEQLWWQELDIKTHVSTVMEQENVSSKDAIKTVMKARNLPKREVYSAYHEIK

SEQ ID NO: 2842 - protein, 90 aa, Listeria monocytogenes
MAKASEHFFYVLKCSDNSYYGGYTTDVLRREAEHNAGIRCKYTKTRRPVKVIHFEKFETRSEATKAEAAFKKLSRKNKDAYLIQREEESE

SEQ ID NO: 2843 - protein, 250 aa, Listeria monocytogenes
LEKLKLIGDERLDYLLAENLRIIQSPSVFSFSIDAVLLAKFSYLPVRKGKIIDLCSGNGIIPLLLSTRTEAQIVGVEIQERLADMAKRSISYNQLEEQIEMIEYDLKNITDLIPKERADIVTCNPPYFATPDTSLKNTNEHFRIARHEVMCTLEDTIRVAASLLKQGGKANFVHRPERLLDIIDIMRKYRLEPKRIQFVHPRIDKEANTVLVEGIKDGKPGVKYVPPVIVYDELGEYTPVIKEILYGESE

SEQ ID NO: 2844 - protein, 129 aa, Listeria monocytogenes
LDKKAIFDSVSNMEEQIGELYQQLGDLKTNLGEMLEENNRLNLENEHLRRRLSLTDEATPEPKAETEAEHGVMAPNRKEAMQQMIELGEGYDNLVQLYKEGFHVCNVHFGSPRGNDEDCLFCLSLLNKK

SEQ ID NO: 2845 - protein, 277 aa, Listeria monocytogenes
MLKIVGVRFKDVGKIYYFSPGELEITENQGVIVENAQGIEFGKTVIEPRYVDEEDVVLPLKKVLRIATEADYKCVAENGDSCQKAFLLCDEKIRERELEMSLVDVDYTFDRNKIIFYFTAEGRVDFRELVKDLASVFRTRIELRQIGVRDEAKLLGGIGPCGRMLCCSTFLGDFEPVSIKMAKDQNLSLNPTKISGLCGRLMCCLKYENDEYEQAKREMPDVGVKVKTPEGAEARVSGINLLSRILQVSLPEEETVIEYELDELRPYNEFLKQPAKS

SEQ ID NO: 2846 - protein, 330 aa, Listeria monocytogenes
VGLQDELTMMQPVVMKIFSKSVRENRLSHGYLFEGTRGTGKKRTALWLAQSLFCLESTETELACGKCTNCTRIASHNHPDVHLLEPDGASIKIDQVRALKQELSKRGMESDQKVVIIYDAEKMTVQSANSLLKFIEEPEGGLLLLFLTTNPGQILPTIQSRLQPVTFKSLTFDSLLASLTAAGISEQKARIYASITGSVEEAKAFEESEWFSEARNVVIKLYEGIHHQGTSPLIIIQESWMPLFKEKDKMALGLELLLLLYRDRLHLTLDENYEPICTAQKEMLGQDALRKSLSETTGEIEKILAAKSKLDSNMNTQLLMEQLVLEIQGR

SEQ ID NO: 2847 - protein, 346 aa, Listeria monocytogenes
MSKNQATAYIGTYTKAESQGIYRLVIDKTTGEIKENKLAGKMDNPTYLKISDDEKFVYSVAKDGDKGGVAAFSVEEDGSLTFIGQDVQTGNPPCYVDASHDGSIVVSANYHLGTIVSYPTENGALKPSVSTIQHTGKSVHERQEKPHAHFAGFTPEQKYVITCDLGTDKVTTYSANAGKLEKVTELDVKPGSGPRNLVFHPNAKYVYIMTELTSEVIFAEYDEATGALKVIQTIASLPEGFDKENKGSAIHISPDGRFLYVSNRGQDAIVSYAVAENGTLTHAATTPVEGVGPRDFDLNYTGEILVATNENSNNVTVFGVNKETGALTLLQKDVKVPEPVCIKFVK

SEQ ID NO: 2848 - protein, 231 aa, Listeria monocytogenes
VATGKLNVYLVRHGKTMFNTSRRVQGWSDTPLTNEGIEVAEFLGRGLREIPFDAVYTSDRGRTIETAGIVLRESNQAHLEINELRDFREFGFGKFEGEYEDIMFGRVMEHLGFRSMEEAFEKFGDDGYQIISETVEKIDETGMSENWDEMVARLKNALGTVSAENEVENANVLVVSHGMAINTIISFFDKSLINPDLANASVTRLGFENGEWTIEMVNDLSYIEAGKLVLV

SEQ ID NO: 2849 - protein, 235 aa, Listeria monocytogenes
MESSSRVVIYLTRHGKTILNTLDRVQGWADSPLTEEGALVAHDLGRGLKGTNFVAAYASDRGRAIETARIVMKESDNHHLKLEKLAEMREFGFGKFEGEYNQAVLKMVAKAHGFESIESYYDKTSENNSNIVIDTVHKMDETGMTENSAIFEERLTAGLDTILADANKRGGGDVLVVAHGMVIHRIIEMIDPSKNLRIIENASVTKVIFEDGAYSIEEPGNMLYVEAGKKAQGGV

SEQ ID NO: 2850 - protein, 492 aa, Listeria monocytogenes
LSTNKEKTFFGHPRGLATLFNTEFWERFSYYGMRALLLYYMYTAVADGGLGFSQSTATAIMSIYGSLVFMSGVIGGWFADRVLGARKTIFYGGVLIMVGHIVLALPNGGAAALFGSMAFIILGTGLLKPNVSNVVGDLYPAGDNRRDAGFSIFYMGINLGAFIAPPIVSAVSDNAGSYHAGFGVAAVGMAIALVVYVLTGKRYLKDAGKKAPNPLQRSEAKSLTFKIIGIVLGIGLLIAVLTLITGSLTIDTIILAVTVMGVGVPLAYFIMMMTSKKTEADEKSRLTAYIPLFLIAVLFWMIEEQGSSTLALFAAERTDLSIWGMNLNPANFQSLNPVFVITLSPIFAWIWTKLGDRQPSTPRKFALGLFFAGLSFVVMMLPGILHGNTTTLVSPLWLVLSFFICIFGEMFISPVGLSATTKLAPKAFASQTMSLWFLSDAMGQSFNAQLTQLFNADTEIAYFGITGFVAIAFAIALFIFAPFLKKYMKGVH

SEQ ID NO: 2851 - protein, 393 aa, Listeria monocytogenes
MQKEMLNFDYYNPTHIIFGKNRFNELNEVIPQDKKVLILYGGGSVERFGTLDKVKAALKSREVGEFGGIEANPTYETLIKAIQLVKEENYDFLLAVGGGSVIDGTKFVAAGALFDGEPMDIFGSGIGEKRPITKALPFGTVLTLPATGSEMNSGGVITFVEKKAKLGFGSAYTYPVFSLLDPELTYTLPKRQLANGIMDAYVHVMEQYMTYPVGALLQDRYAESLLQTLIEIGPDVIKEDNHDYNTRATFMWSATNALNGTLSRGVPQDWASHSLGHEITALYGIDHARTLAIVLPSLLNVRRSEKHDKLVQYAERVWGITSGSDEEKIDAAILKTREFFESLGAGTRFSDYGLGEEVVDLLVDQLDRHGLTNISERGDQTLEVSRQIYTNAL

SEQ ID NO: 2852 - protein, 211 aa, Listeria monocytogenes
MLIKNLCIPKINLTTVPGDATLQEAIHLLEESGYRCVPVLDEKGEKFLGNIYKMHIYKHAANGGSLSDPVMSLIKNATKHICVNASFFEVFFTIKELPYIAVLNEQGNFYGILTHGKLLGLLQDGWNVKTTSYVLTIATGEVQGALTKITKIIDRYSSISSLITLDNQTEDFIRRVLVSLPVGVTEEKKNEIVSHLERKGLRVVETEKIEK

SEQ ID NO: 2853 - protein, 343 aa, Listeria monocytogenes
LKKICAIIFACILAILCFPGQQAYATENSSFSVKAILPDNQASSVTYFDLQMNPKQKQTLKVEITNHSKEEITVNCVANTAVTNEMGYVDYSIPNTKPDKTLKYPFADIVKESVSEVTLKPNETKIWTAAIQMPAENYDGIILGGLHFQEKKEEDKEKESSENDVQIKNEYAYVIGVKLTEKTTVVKPELELNQIKPATRNYRNVVEMNLQNTKATLVGGLAVDAKIYKKGSEKVLHESKRTDLSMAPNSNFNYSVDWENQELKPGKYKVHLVAKNKEDKWEWTKEFTISSDQAKKANKAALGLEKDYTWMYIVGGVLLFILLIITTYFVGKRAAKKKQENEK

SEQ ID NO: 2854 - protein, 280 aa, Listeria monocytogenes
MTSRTVKVTTASLLALGLIVAPVLSGDFASAATSVTKDSKGIVKFDKSTTPDPDPVNPDPVDPDPVIPDPTDPPLGTDGLWILAVSDWDFGTHNVSSLSSGALNVHAADDTISTYVDANGNGQQDLPGEVSVTKKVTPYAQISDVRGTNTGWTLSVTGSAFKDSSTPAKTIPGAELTIPKSTVSSATSTAQAPTGYDSVTISMTGGAAVPVMAAKDMQTATPTNFNDDQGMGTWTDSFGSQAVSATDTSKPKLSIPKNVVVADGTYQSTLTWTLSDTPAV
